(19) United States
(12) Patent Application Publication
(10) Pub. No.: US 2014/0148622 A1
(43) Pub. Date: May 29, 2014

(54) Engineering Plants to Produce Farnesene and Other Terpenoids

(71) Applicants: Ramesh Nair, Naperville, IL (US); Oswald Crasta, Carmel, IN (US); Otto Folkerts, Urbana, IL (US); Joshua Blakeslee, Wooster, OH (US); Katrina Cornish, Wooster, OH (US)

(72) Inventors: Ramesh Nair, Naperville, IL (US); Oswald Crasta, Carmel, IN (US); Otto Folkerts, Urbana, IL (US); Joshua Blakeslee, Wooster, OH (US); Katrina Cornish, Wooster, OH (US)

(73) Assignees: THE OHIO STATE UNIVERSITY, Columbus, OH (US); CHROMATIN, INC., Chicago, IL (US)

(21) Appl. No.: 14/086,713

(22) Filed: Nov. 21, 2013

Related U.S. Application Data
(60) Provisional application No. 61/728,958, filed on Nov. 21, 2012.

(51) Int. Cl. C12P 5/00; C07C 11/21

(52) U.S. Cl. CPC C12P 5/007; C07C 11/21
USPC 585/16; 435/167; 435/419; 800/278; 800/298

(57) ABSTRACT

The present invention relates to engineering plants to express higher levels than endogenous amounts of terpenoids, such as farnesene. Plants that can be so engineered include those with large carbon stores, such as sweet sorghum and sugar cane.

### CROSS REFERENCE TO RELATED APPLICATION

[0001] This application claims priority to Nair, R., et al., U.S. Provisional Application No. 61/728,958, “ENGINEERING PLANTS TO PRODUCE FARNESENE AND OTHER TERPENOIODS,” filed Nov. 21, 2012, incorporated by reference herein in its entirety.

### FIELD OF THE INVENTION

[0002] The present invention relates to engineering plants to express higher levels than endogenous amounts of terpenoids, such as farnesene.

### GOVERNMENT SUPPORT

[0003] Not applicable.

### COMPACT DISC FOR SEQUENCE LISTINGS AND TABLES

[0004] Not applicable.

### BACKGROUND OF THE INVENTION

[0005] Agricultural and aquacultural crops have the potential to meet escalating global demands for affordable and sustainable production of food, fuels, fibers, therapeutics, and biofeedstocks.

[0006] Development of sustainable sources of domestic energy is crucial for the US to achieve energy independence. In 2010, the US produced 13.2 billion gallons of ethanol from corn grain and 315 million gallons of biodiesel from soybeans as the predominant forms of liquid biofuels (Board, 2011; RFA, 2011). It is expected that biofuels based on corn grain and soybeans will not exceed 15.8 billion gallons in the long term. Although efforts to convert biomass to biofuel by either enzymatic or thermochemical processes will continue to contribute towards energy independence (Lin and Tanaka, 2006; Nigam and Singh, 2011), this process alone is not enough to achieve the target goals of biofuel production. It is projected that only 12% of all liquid fuels produced in the US will be derived from renewable sources by 2035, far below the mandated 30% (Newell, 2011). To reach the target levels of 30% of all liquid fuels consumed in US by 2035, new and innovative biofuel production methodologies must be employed.

[0007] Because of their abundance and high energy content terpenoids provide an attractive alternative to current biofuels (Bohlmann and Keeling, 2008; Pourbafrani et al., 2010; Wu et al., 2006). The terpenoid biosynthetic pathway (see FIG. 1) is ubiquitous in plants and produces over 40,000 structures, forming the largest class of plant metabolites (Bohlmann and Keeling, 2008). Research on terpenoids has focused primarily on uses as flavor components or scent compounds (Cheng et al., 2007). Currently, terpene-based biofuel production has focused on using micro-organisms, including yeast and bacterial systems (Fischer et al., 2008; Nigam and Singh, 2011; Peralta-Yahya and Keasling, 2010). This approach is both energy-intensive and infrastructure-demanding, requiring a supply of sugars for large scale fermentation, constant temperature maintenance and other inputs, and immense infrastructure to support meaningful, large-scale microorganism culture. Attempts have been made to overcome these obstacles by engineering algal systems to produce biodiesel hydrocarbons, defraying some of the energy cost by harnessing algal photosynthetic capacity. Algal systems still require significant energy inputs to maintain temperature and salt equilibria. Such systems have yet to produce biodiesel in sufficient quantities to offset the costs of large-scale bioreactors necessary for algal biodiesel production.

### SUMMARY OF THE INVENTION

[0008] In a first aspect, the invention is directed to methods of increasing production of at least one terpenoid, the method comprising expressing in a plant cell a set of heterologous nucleic acids that encode polypeptides comprising enzymes necessary to carry out the mevalonic acid pathway or the methylerythritol 4-phosphate pathway, wherein production of the at least one terpenoid is increased when compared to a wild-type plant cell not encoding the set of heterologous nucleic acids. In additional aspects, both the mevalonic acid pathway and the methylerythritol 4-phosphate pathway are expressed from the heterologous nucleic acids in a plant cell. In additional aspects, the method further comprises expressing in a plant cell heterologous nucleic acids that encode at least one polypeptide comprising an enzyme selected from the group consisting of isopentenyl-diphosphate delta-isomerase, farnesyl diphosphate synthase, and farnesene synthase.

[0009] In some aspects, expressing heterologous nucleic acids encoding enzymes from the mevalonic acid pathway include those encoding methylerythritol 4-phosphate, as well as heterologous nucleic acids encoding at least one polypeptide comprising an enzyme selected from the group consisting of isopentenyl-diphosphate delta-isomerase, farnesyl diphosphate synthase, and farnesene synthase. In some aspects, isopentenyl-diphosphate delta-isomerase, a farnesyl diphosphate synthase; and a farnesene synthase are all expressed. The isopentenyl-diphosphate delta-isomerase can be an isopentenyl-diphosphate delta-isomerase I or isopentenyl-diphosphate delta-isomerase II, and the farnesene synthase is an α-farnesene synthase or a β-farnesene synthase.

[0010] In another aspect, the invention is directed to methods of increasing production of at least one terpenoid, wherein the at least one terpenoid is a sesquiterpenoid, such as farnesene.

[0011] In any aspect of the invention, sesquiterpenoid metabolism can be induced by an elicitor, such as methyl jasmonate, salicylic acid, ethephon and benzothiadiazole. In some embodiments, the elicitor is methyl jasmonate.

[0012] In any aspect of the invention wherein heterologous nucleic acids encoding enzymes of the mevalonic acid pathway are expressed, the pathway comprises nucleic acids encoding a(n): acetyl-CoA acetyltransferase, 3-hydroxy-3-methylglutaryl coenzyme A synthase, 3-hydroxy-3-methylglutaryl-coenzyme A reductase, mevalonate kinase, phosphomevalonate kinase, and mevalonate pyrophosphate decarboxylase. In additional aspects, the heterologous nucleic acids encoding enzymes of the mevalonic acid pathway encode polypeptides having at least 70%-99% sequence identity, including 70%, 75%, 80%, 81%, 82%, 83%, 84%, 85%, 86%, 87%, 88%, 89%, 90%, 91%, 92%, 93%, 94%, 95%, 96%, 97%, 98%, 99%, and 100% sequence identity as follows:
[0013] (i) acetyl-CoA acetyltransferase: selected from the group consisting of SEQ ID NOs:1-4, 143;
[0014] (ii) 3-hydroxy-3-methylglutaryl coenzyme A synthase: selected from the group consisting of SEQ ID NOs:5-9, 144, 145;
[0015] (iii) 3-hydroxy-3-methylglutaryl-coenzyme A reductase: selected from the group consisting of SEQ ID NOs:10-16, 17-20, 146-150;
[0016] (iv) mevalonate kinase: selected from the group consisting of SEQ ID NOs:25-26;
[0017] (v) phosphomevalonate kinase: selected from the group consisting of SEQ ID NOs:27-33 and
[0018] (vi) mevalonate pyrophosphate decarboxylase: selected from the group consisting of SEQ ID NOs:34-40, 152; and
[0019] wherein the polypeptide retains functional activity in the MVA pathway.

[0020] In any aspect of the invention wherein heterologous nucleic acids encoding enzymes of the methylerythritol 4-phosphate pathway are expressed, the pathway comprises nucleic acids encoding a(n) 1-deoxy-D-xylulose-5-phosphate synthase, 1-deoxy-D-xylulose 5-phosphate reductoisomerase, 4-diphosphocytidyl-2-C-methyl-D-erythritol synthase, 4-diphosphocytidyl-2-C-methyl-D-erythritol kinase, 2-C-methyl-D-erythritol 2,4-cyclodiphosphate synthase, 4-hydroxy-3-methylbut-2-en-1-yl diphosphate synthase, and 4-hydroxy-3-methylbut-2-enyl diphosphate reductase. In additional aspects, the heterologous nucleic acids encoding enzymes of the methylerythritol 4-phosphate pathway encode polypeptides having at least 70%-99% sequence identity, including 70%, 75%, 80%, 81%, 82%, 83%, 84%, 85%, 86%, 87%, 88%, 89%, 90%, 91%, 92%, 93%, 94%, 95%, 96%, 97%, 98%, 99%, and 100% sequence identity as follows:
[0021] (i) 1-deoxy-D-xylulose-5-phosphate synthase: selected from the group consisting of SEQ ID NOs:41-49, 153, 154, 169, 177-180;
[0022] (ii) 1-deoxy-D-xylulose 5-phosphate reductoisomerase: selected from the group consisting of SEQ ID NOs:50-58, 155, 156, 170, 181;
[0023] (iii) 4-diphosphocytidyl-2-C-methyl-D-erythritol synthase: selected from the group consisting of SEQ ID NOs:59-67, 157, 171, 182;
[0024] (iv) 4-diphosphocytidyl-2-C-methyl-D-erythritol kinase: selected from the group consisting of SEQ ID NOs:68-73, 158, 172, 183;
[0025] (v) 2-C-methyl-D-erythritol 2,4-cyclodiphosphate synthase: selected from the group consisting of SEQ ID NOs:74-82, 159, 173, 184;
[0026] (vi) 4-hydroxy-3-methylbut-2-en-1-yl diphosphate synthase, and: selected from the group consisting of SEQ ID NOs:83-89, 160, 174, 185; and
[0027] (vii) 4-hydroxy-3-methylbut-2-enyl diphosphate reductase: selected from the group consisting of SEQ ID NOs:90-97, 161-163, 175, 186 and
[0028] wherein the polypeptide retains functional activity in the MEP pathway.

[0029] In other aspects of the invention wherein heterologous nucleic acids encoding enzymes of the mevalonic acid pathway are expressed, the pathway comprises nucleic acids encoding a(n): acetyl-CoA acetyltransferase, 3-hydroxy-3-methylglutaryl coenzyme A synthase, 3-hydroxy-3-methylglutaryl-coenzyme A reductase, mevalonate kinase, phosphomevalonate kinase, and mevalonate pyrophosphate decarboxylase, these heterologous nucleic acids encode polypeptides from Archaea, bacteria, fungi, and plantae kingdoms. In additional aspects, the heterologous nucleic acids encoding enzymes from the plantae kingdom of the mevalonic acid pathway. In other aspects, the mevalonic acid pathway heterologous nucleic acids encoding polypeptides from the plantae kingdom have at least 70%-99% sequence identity, including 70%, 75%, 80%, 81%, 82%, 83%, 84%, 85%, 86%, 87%, 88%, 89%, 90%, 91%, 92%, 93%, 94%, 95%, 96%, 97%, 98%, 99%, and 100% sequence identity as follows:
[0030] (i) acetyl-CoA acetyltransferase comprises SEQ ID NO: 4;
[0031] (ii) 3-hydroxy-3-methylglutaryl coenzyme A synthase selected from the group consisting of SEQ ID NOs: 8-9;
[0032] (iii) 3-hydroxy-3-methylglutaryl-coenzyme A reductase selected from the group consisting of SEQ ID NOs:15, 16, 20;
[0033] (iv) mevalonate kinase, comprising SEQ ID N0:26;
[0034] (v) phosphomevalonate kinase, selected from the group consisting of SEQ ID NOs:32-33 and
[0035] (vi) mevalonate pyrophosphate decarboxylase selected from the group consisting of SEQ ID NOs:39-40; and
[0036] wherein the polypeptide retains functional activity in the MVA pathway

[0037] In other aspects of the invention, wherein heterologous nucleic acids encoding enzymes of the methylerythritol 4-phosphate pathway are expressed, the pathway comprises nucleic acids encoding a(n) 1-deoxy-D-xylulose-5-phosphate synthase, 1-deoxy-D-xylulose 5-phosphate reductoisomerase, 4-diphosphocytidyl-2-C-methyl-D-erythritol synthase, 4-diphosphocytidyl-2-C-methyl-D-erythritol kinase, 2-C-methyl-D-erythritol 2,4-cyclodiphosphate synthase, 4-hydroxy-3-methylbut-2-en-1-yl diphosphate synthase, and 4-hydroxy-3-methylbut-2-enyl diphosphate reductase, these heterologous nucleic acids encode polypeptides from Archaea, bacteria, fungi, and plantae kingdoms. In additional aspects, the heterologous nucleic acids encoding enzymes from the plantae kingdom. In additional aspects, the heterologous nucleic acids encoding enzymes from the plantae kingdom of the methylerythritol 4-phosphate pathway. In other aspects, the methylerythritol 4-phosphate pathway heterologous nucleic acids encoding polypeptides from the plantae kingdom have of the methylerythritol 4-phosphate pathway encode polypeptides having at least 70%-99% sequence identity, including 70%, 75%, 80%, 81%, 82%, 83%, 84%, 85%, 86%, 87%, 88%, 89%, 90%, 91%, 92%, 93%, 94%, 95%, 96%, 97%, 98%, 99%, and 100% sequence identity as follows:
[0038] (i) 1-deoxy-D-xylulose-5-phosphate synthase selected from the group consisting of SEQ ID NOs:41, 48-49;
[0039] (ii) 1-deoxy-D-xylulose 5-phosphate reductoisomerase selected from the group consisting of SEQ ID NOs:50, 56-58;
[0040] (iii) 4-diphosphocytidyl-2-C-methyl-D-erythritol synthase selected from the group consisting of SEQ ID NOs:59, 66-67;
[0041] (iv) 4-diphosphocytidyl-2-C-methyl-D-erythritol kinase selected from the group consisting of SEQ ID NOs:68, 73;
[0042] (v) 2-C-methyl-D-erythritol 2,4-cyclodiphosphate synthase selected from the group consisting of SEQ ID NOs:74, 80-82;
[0043] (vi) 4-hydroxy-3-methylbut-2-en-1-yl diphosphate synthase selected from the group consisting of SEQ ID NOs:83, 89; and
[0044] (vii) 4-hydroxy-3-methylbut-2-enyl diphosphate reductase selected from the group consisting of SEQ ID NOs:90, 96-97 and
[0045] wherein the polypeptide retains functional activity in the MEP pathway.
[0046] (viii) In additional aspects of the invention, in any method wherein the method comprises expressing heterologous nucleic acids encoding polypeptides for isopentenyl-diphosphate delta-isomerase, farnesyl diphosphate synthase, and farnesene synthase, the nucleic acids encode polypeptides having at least 70%-99% sequence identity, including 70%, 75%, 80%, 81%, 82%, 83%, 84%, 85%, 86%, 87%, 88%, 89%, 90%, 91%, 92%, 93%, 94%, 95%, 96%, 97%, 98%, 99%, and 100% sequence identity as follows:
[0047] (i) isopentenyl-diphosphate delta-isomerase selected from the group consisting of SEQ ID NOs:98-101, 102-106, 188, 190-192;
[0048] (ii) farnesyl diphosphate synthase selected from the group consisting of SEQ ID NOs:107-111, 164, 165, 176, 187, 189; and
[0049] (iii) farnesene synthase selected from the group consisting of SEQ ID NOs:112-115, 116-117, 166-168 and
[0050] wherein the polypeptide retains functional activity.

[0051] In additional aspects of the invention, in any method wherein the method comprises expressing heterologous nucleic acids encoding polypeptides for isopentenyl-diphosphate delta-isomerase, farnesyl diphosphate synthase, and farnesene synthase, the nucleic acids encode polypeptides from the plantae kingdom. In other aspect, the isopentenyl-diphosphate delta-isomerase, farnesyl diphosphate synthase, and farnesene synthase polypeptides from the plantae kingdom have at least 70%-99% sequence identity, including 70%, 75%, 80%, 81%, 82%, 83%, 84%, 85%, 86%, 87%, 88%, 89%, 90%, 91%, 92%, 93%, 94%, 95%, 96%, 97%, 98%, 99%, and 100% sequence identity as follows:
[0052] (i) isopentenyl-diphosphate delta-isomerase, having at least 70% sequence identity to at least one amino acid sequence selected from the group consisting of SEQ ID NOs:98-101, 102-106, 188, 190-192;
[0053] (ii) farnesyl diphosphate synthase, having at least 70% sequence identity to at least one amino acid sequence selected from the group consisting of SEQ ID NOs:107-111, 164, 165, 176, 187, 189; and
[0054] (iii) farnesene synthase, having at least 70% sequence identity to at least one amino acid sequence selected from the group consisting of SEQ ID NOs:112-115, 116-117, 166-168 and wherein the polypeptide retains a functional activity.

[0055] In any aspects of the invention expressing heterologous nucleic acids encoding polypeptides comprising enzymes necessary to carry out the mevalonic acid pathway or the methylerythritol 4-phosphate pathway, or isopentenyl-diphosphate delta-isomerase, farnesyl diphosphate synthase, and farnesene synthase activity, at least two of the heterologous nucleic acids are introduced into the plant cell on a single recombinant DNA construct. In some aspects, such a recombinant DNA construct may autonomously segregate to daughter cells during cell division, such as during mitosis or meiosis. In additional aspects, the autonomously segregating recombinant DNA construct comprises a plant centromere, such as a heterologous centromere or a centromere from the same plant as the cell in which the construct is introduced. In additional aspects, the recombinant DNA construct is a mini-chromosome. In yet other aspects, only plasmid constructs are used; in other aspects, a combination of mini-chromosomes and plasmid constructs are used.

[0056] In further aspects, the methods of the invention comprise expressing from a single mini-chromosome heterologous nucleic acids encoding enzymes of the mevalonic acid pathway or the methylerythritol 4-phosphate pathway; in other aspects, both the mevalonic acid pathway or the methylerythritol 4-phosphate pathway are expressed from a single mini-chromosome. In any of these aspects, the mini-chromosome may further comprise heterologous nucleic acids encoding polypeptides comprising at least one enzyme selected from the group consisting of isopentenyl-diphosphate delta-isomerase, farnesyl diphosphate synthase and farnesene synthase. In yet additional aspects, isopentenyl-diphosphate delta-isomerase, farnesyl diphosphate synthase and farnesene synthase are all expressed from the same mini-chromosome.

[0057] In further aspects, any of the methods and compositions as described above comprise plant cells wherein the production of at least one terpenoid is increased includes plant cells selected from the group consisting of a green algae, a vegetable crop plant, a fruit crop plant, a vine crop plant, a field crop plant, a biomass plant, a bedding plant, and a tree. In other aspects, the plant is selected from the group consisting of corn, soybean, Brassica, tomato, sorghum, sugar cane, miscanthus, guayle, switchgrass, wheat, barley, oat, rye, wheat, rice, (sugar) beet, green algae, Hevea and cotton. In some aspects, the plant is selected from the group consisting of sorghum, sugar cane, guayule, Hevea, and (sugar) beet.

[0058] In other aspects of the invention, any of the methods of the invention may further comprise isolating the farnesene. Such aspects may further comprise processing the farensene into farnesane.

[0059] In yet additional aspects, the invention comprises a plant made comprising a plant cell made by any of the methods of the invention.

[0060] In another aspect, the invention comprises a fuel comprising a terpenoid which production is increased by any of the methods of the invention, or made by a plant cell or plant made by any of the methods of the invention. Such terpenoids comprise sesquiterpenoids, such as farnesene and farnesane.

### BRIEF DESCRIPTION OF SEVERAL VIEWS OF THE DRAWINGS

[0061] FIG. 1 shows a schematic of the isoprenoid pathway in plants. Solid arrows, broken arrows with short dashes and broken arrows with long dashes represent single and multiple enzymatic steps and transport, respectively. Abbreviations: ABA, a bscissic acid; BRs, brassinosteroids; CYTP450, cytochrome P450 hydroxylases; DMADP; dimethylallyl diphosphate; DXP, deoxyxylulose-5-phosphate; DXR, DXP reductoisomerase; DXS, DXP synthase; FDP, farnesyl diphosphate; GDP, geranyl diphosphate; GGDP, geranylgeranyl diphosphate; GlyAld-3-P, glyceraldehydes 3-phopshate; HDR+, hydroxymethylbutenyl diphosphate reductase; IDP, isopentenyl diphosphate; MEP, methylerythritol 4-phosphate; MVA, mevalonic acid. Terpenes includes terpenes from all classes and originating from the various organelles (Adapted from (2005) Trends in Plant Science 10 (12):591-599. See also Table of Abbreviations at the end of the Detailed Description for additional abbreviations used through the specification.

[0062] FIGS. 2-7 show just a few constructs that are useful in various aspects of the invention. FIGS. 2A, 3A, 4A, 5A, 6A, and 7A (upper portion of each figure) show examples of constructs with specific transgenes operably linked to various control elements, such as promoters and terminators. FIGS. 2B, 3B, 4B, 5B, 6B, and 7B (lower portion of each figure) show generic examples of the constructs exemplified in part A of each figure.

[0063] FIG. 8 shows GC analysis of sugar cane leaf samples. (A) Sugar cane leaf samples that are induced with 4 mM methyl jasmonate shows production of caryophyllene, farnesene and other sesquiterpenes after 30 hrs of MeJ induction. (B). Sugar cane leaf samples that are treated with water for 30 hrs do not show any indication of farnesene and caryophyllene production.

### DETAILED DESCRIPTION OF THE INVENTION

### I. Introduction

[0064] The present invention represents a novel approach to produce liquid biofuels from plants. The invention provides crop systems that can generate liquid sesquiterpenoid, such as β-farnesene, resins which can then be converted to biodiesel molecules, such as β-farnesane. This approach offers several advantages over current biofuel technologies. Unlike starch- or cellulose-based ethanol production, which includes saccharification and fermentation, producing such resins for fuel has fewer steps, thus reducing necessary production infrastructure. Sesquiterpenoids have useful properties, such as immiscibility with water, which enables concentrating the fuel without distillation—which is otherwise needed to concentrate fuel produced by starch and cellulosic biofuel production technologies. Compared to current biodiesel production, extraction of β-farnesene from biomass and conversion to farnesane is a one-step hydrogenation process, reducing the overall production cost. Unlike biodiesel currently produced from soy or canola seed oil, the whole plant, not just the seeds, can be used in the present invention.

[0065] The invention takes a unique approach to overcome hurdles encountered in current efforts to generate biofuels from terpenoid and biodiesel production in microorganisms, such as yeasts and algae. Energy inputs are drastically reduced by utilizing the photosynthetic capacity of an entire plant and funneling all non-essential carbon into the production of β-farnesene-enriched resins, such as is possible in plants like sweet sorghum, sugar cane, Hevea sp. and guayule. These resins can be used as a readily-extractable liquid biofuel. Furthermore production of biofuel in crops does not require the cost associated with developing microbial fermentation processes and facilities and can capitalize on a vast existing agricultural infrastructure.

[0066] The present invention describes methods of expressing the enzymes of the mevalonic acid (MVA) pathway needed for the conversion of Acetyl CoA into β-farnesene in the cytosol of modified plants and plant cells. The present invention also describes methods of expressing enzymes of the methylerythritol 4-phosphate (MEP) pathway for the conversion of pyruvate CoA into β-farnesene in chloroplast of plants. Furthermore, the invention describes methods wherein isopentenyl-diphosphate delta-isomerase (IDDI), farnesyl diphosphate synthase (FDS) and farnesene synthase (FS; (collectively “IFF”)) activities are expressed to accumulate farnesene. The present invention describes how the genes that code for MVA and MEP pathway enzymes are regulated in plants to produce β-farnesene without severely affecting plant growth and development. The present invention also describes how plants that accumulate sucrose and other sugar molecules, such as sorghum, sugar cane, sugar beet, etc., can be engineered to produce sesquiterpenes and other high energy terpenoid compounds that can be readily used as biofuels or converted to biodiesel.

[0067] The invention provides methods, plant cells and plants that produce β-farnesene and related alkene sesquiterpenes in high yields that can be readily extracted and converted to low-cost liquid biofuels. In some embodiments, mini-chromosome (MC) gene-stacking technology is used to advantageously engineer β-farnesene production into plant cells and plants; in further embodiments, such plants are sugar cane (Saccharum sp.), guayule (Parthenium argentatum), Hevea and sweet sorghum (Sorghum bicolor). In other embodiments, the heterologous genes are carried on one or more plasmids, or, a combination of MCs and plasmids is used. The invention also provides for methods to extract and process farnesene produced by such engineered plant cells and plants into the biofuel molecule farnesane. While there is a report that the MVA pathway has been expressed in tobacco plant cells (Kumar, S. et al. Remodeling the isoprenoid pathway in tobacco by expressing the cytoplasmic mevalonate pathway in chloroplasts. Metabolic Engineering 14:19-28 (2012), the present invention is the first to describe the MVA, MEP and “IFF” pathways in sorghum and sugar cane plant cells.

[0068] The present invention describes engineering plants, such as sweet sorghum and sugar cane, to produce β-farnesene and other energy rich terpenoid molecules that can be readily used as biofuels or converted to biofuels, and primarily relies on rerouting sucrose stored in the plant into energy rich sesquiterpenes during normal growth and development. Sorghum generally produces sesquiterpenes in small amounts during stress conditions such as insect damage and/or during disease outbreak. This suggests that the genes required for sesquiterpene production are developmentally regulated and are induced during stress situations such as insect attack.

[0069] Sorghum, a C4 monocotyledonous grass grown in the southwestern, central and Midwestern US, has high photosynthetic efficiency, water and nutrient efficiency, stress tolerance, and is unmatched in its diversity of germplasm including starch (grain) types, high sugar (sweet) types, and high-biomass photoperiod sensitive (forage) types. Sorghum outperforms corn in regions with low annual rainfall, making it an ideal crop for semi-arid regions (Zhan et al., 2003).

[0070] Sorghum can be grown on more than 70 million Ha where bioenergy crops are currently farmed. Production of liquid β-farnesene biofuel in sorghum can produce low-cost transportation fuel and allow diversification of feedstock supply and land use with minimal impact on food crops. In contrast, 1 Ha of soybeans can produce about 150-250 gallons of biodiesel, while engineered sorghum, sugar cane or guayle that contain, for example, 20% by dry weight farnesene at 39-56 t/Ha of harvested yield have the production potential of 1800-2800 gallons of biofuel/Ha. Further, engineered plants containing 20% farnesene by dry weight when processed, can produce 250-388 GJ/Ha/year of biofuel with an energy density of 47.5 MJ/L, with an estimated process cost at scale of $8.46-9.14/GJ. Production of high farnesene biofuel from guayule and sorghum on 110 million Ha has the theoretical potential to produce over 30 EJ/yr (approximately 30% of the current US annual energy requirement).

[0071] In embodiments of the invention, the entire cytosolic MVA pathway or the entire chloroplastic MEP pathway, or both pathways, are introduced into plant cells, such as sweet sorghum cells. In cytosolic terpenoid synthesis, pyruvate formed from the glycolysis of sucrose molecules is converted into Acetyl-CoA which is incorporated into hydroxymethylglutaryl-coenzyme A (HMG-CoA) by the enzyme 3-hydroxy-3-methylglutaryl-coenzyme A reductase (Bach et al., 1991; Enjuto et al., 1994). HMG-CoA is then processed through the MVA pathway and used to generate dimethylallyl pyrophosphate (DMAPP) and isopentenyl pyrophosphate (IPP), both 5-carbon isoprene monomers for terpenoid biosynthesis (Bach et al., 1991; Cheng et al., 2007; Enjuto et al., 1994). In chloroplastic terpenoid synthesis, pyruvate and glyceraldehydes 3-phosphate are converted to 1-Deoxy-D-xylulose-5-P by 1-Deoxy-D-xylulose-5-P synthase which is then processed by MEP pathway enzymes to Dimethylallyl pyrophosphate (DMAPP) and isopentenyl pyrophosphate (IPP). These monomers are assembled together in a series of head-to-tail condensation reactions to generate farnesyl pyrophosphate (FPP, C15), a reaction catalyzed by the enzyme farnesyl diphosphate synthase (FPP synthase/FDPS). The final reaction is catalyzed by the enzyme β-farnesene synthase which converts FPP into β-farnesene.

### II. Making and Using the Invention

### Note: Definitions are Found at the End of the Detailed Description, Before the Examples

### A. Selected Embodiments

[0072] To maximize production of terpenoids, the enzymes (or their activities) of the MVA or the MEP or both pathways are transgenically expressed in plant cells to increase terpenoid production over non-transgenic plant cells. Furthermore, the IFF pathway can also be expressed to drive the production of farnesene. Plants with high, free carbon stores, high-energy density, such as sorghum genotypes with high-sugar content and sugar cane, as well as Hevea sp. and guayule, can be used to maximize flux distribution into the sesquiterpenoid metabolic pathway.

[0073] The invention also provides for extraction of farnesene from biomass (from plant cells and plants) and efficient processing technology to convert farnesene into the biofuel molecule farnesane. Such engineered plants, such as sorghum and sugar cane, can be intergressed into elite germplasm or into publicly available (and alternatively, improved) lines, to facilitate commercial production.

[0074] Thus, In a first embodiment, the invention is directed to methods of increasing production of at least one terpenoid, the method comprising expressing in a plant cell a set of heterologous nucleic acids that encode polypeptides comprising enzymes necessary to carry out the mevalonic acid pathway or the methylerythritol 4-phosphate pathway, wherein production of the at least one terpenoid is increased when compared to a wild-type plant cell not encoding the set of heterologous nucleic acids. In additional embodiments, both the mevalonic acid pathway and the methylerythritol 4-phosphate pathway are expressed from the heterologous nucleic acids in a plant cell. In additional embodiments, the method further comprises expressing in a plant cell heterologous nucleic acids that encode at least one polypeptide comprising an enzyme selected from the group consisting of isopentenyl-diphosphate delta-isomerase, farnesyl diphosphate synthase, and farnesene synthase.

[0075] In some embodiments, expressing heterologous nucleic acids encoding enzymes from the mevalonic acid pathway include those encoding methylerythritol 4-phosphate, as well as heterologous nucleic acids encoding at least one polypeptide comprising an enzyme selected from the group consisting of isopentenyl-diphosphate delta-isomerase, farnesyl diphosphate synthase, and farnesene synthase. In some embodiments, isopentenyl-diphosphate delta-isomerase, a farnesyl diphosphate synthase; and a farnesene synthase are all expressed. The isopentenyl-diphosphate delta-isomerase can be an isopentenyl-diphosphate delta-isomerase I or isopentenyl-diphosphate delta-isomerase II, and the farnesene synthase is an α-farnesene synthase or a β-farnesene synthase.

[0076] In another embodiment, the invention is directed to methods of increasing production of at least one terpenoid, wherein the at least one terpenoid is a sesquiterpenoid, such as farnesene.

[0077] In any embodiment of the invention wherein heterologous nucleic acids encoding enzymes of the mevalonic acid pathway are expressed, the pathway comprises nucleic acids encoding a(n): acetyl-CoA acetyltransferase, 3-hydroxy-3-methylglutaryl coenzyme A synthase, 3-hydroxy-3-methylglutaryl-coenzyme A reductase, mevalonate kinase, phosphomevalonate kinase, and mevalonate pyrophosphate decarboxylase. In additional embodiments, the heterologous nucleic acids encoding enzymes of the mevalonic acid pathway encode polypeptides having at least 70%-99% sequence identity, including 70%, 75%, 80%, 81%, 82%, 83%, 84%, 85%, 86%, 87%, 88%, 89%, 90%, 91%, 92%, 93%, 94%, 95%, 96%, 97%, 98%, 99%, and 100% sequence identity as follows:
[0078] (i) acetyl-CoA acetyltransferase: selected from the group consisting of SEQ ID NOs:1-4, 143;
[0079] (ii) 3-hydroxy-3-methylglutaryl coenzyme A synthase: selected from the group consisting of SEQ ID NOs:5-9, 144, 145;
[0080] (iii) 3-hydroxy-3-methylglutaryl-coenzyme A reductase: selected from the group consisting of SEQ ID NOs:10-16, 17-20, 146-150;
[0081] (iv) mevalonate kinase: selected from the group consisting of SEQ ID NOs:25-26;
[0082] (v) phosphomevalonate kinase: selected from the group consisting of SEQ ID NOs:27-33 and
[0083] (vi) mevalonate pyrophosphate decarboxylase: selected from the group consisting of SEQ ID NOs:34-40, 152; and
[0084] wherein the polypeptide retains functional activity in the MVA pathway.

[0085] In any embodiment of the invention wherein heterologous nucleic acids encoding enzymes of the methylerythritol 4-phosphate pathway are expressed, the pathway comprises nucleic acids encoding a(n) 1-deoxy-D-xylulose-5-phosphate synthase, 1-deoxy-D-xylulose 5-phosphate reductoisomerase, 4-diphosphocytidyl-2-C-methyl-D-erythritol synthase, 4-diphosphocytidyl-2-C-methyl-D-erythritol kinase, 2-C-methyl-D-erythritol 2,4-cyclodiphosphate synthase, 4-hydroxy-3-methylbut-2-en-1-yl diphosphate synthase, and 4-hydroxy-3-methylbut-2-enyl diphosphate reductase. In additional embodiments, the heterologous nucleic acids encoding enzymes of the methylerythritol 4-phosphate pathway encode polypeptides having at least 70%-99% sequence identity, including 70%, 75%, 80%, 81%, 82%, 83%, 84%, 85%, 86%, 87%, 88%, 89%, 90%, 91%, 92%, 93%, 94%, 95%, 96%, 97%, 98%, 99%, and 100% sequence identity as follows:
[0086] (i) 1-deoxy-D-xylulose-5-phosphate synthase: selected from the group consisting of SEQ ID NOs:41-49, 153, 154, 169, 177-180;
[0087] (ii) 1-deoxy-D-xylulose 5-phosphate reductoisomerase: selected from the group consisting of SEQ ID NOs:50-58, 155, 156, 170, 181;
[0088] (iii) 4-diphosphocytidyl-2-C-methyl-D-erythritol synthase: selected from the group consisting of SEQ ID NOs:59-67, 157, 171, 182;
[0089] (iv) 4-diphosphocytidyl-2-C-methyl-D-erythritol kinase: selected from the group consisting of SEQ ID NOs:68-73, 158, 172, 183;
[0090] (v) 2-C-methyl-D-erythritol 2,4-cyclodiphosphate synthase: selected from the group consisting of SEQ ID NOs:74-82, 159, 173, 184;
[0091] (vi) 4-hydroxy-3-methylbut-2-en-1-yl diphosphate synthase, and: selected from the group consisting of SEQ ID NOs:83-89, 160, 174, 185; and
[0092] (vii) 4-hydroxy-3-methylbut-2-enyl diphosphate reductase: selected from the group consisting of SEQ ID NOs:90-97, 161-163, 175, 186 and
[0093] wherein the polypeptide retains functional activity in the MEP pathway.

[0094] In other embodiments of the invention wherein heterologous nucleic acids encoding enzymes of the mevalonic acid pathway are expressed, the pathway comprises nucleic acids encoding a(n): acetyl-CoA acetyltransferase, 3-hydroxy-3-methylglutaryl coenzyme A synthase, 3-hydroxy-3-methylglutaryl-coenzyme A reductase, mevalonate kinase, phosphomevalonate kinase, and mevalonate pyrophosphate decarboxylase, these heterologous nucleic acids encode polypeptides from Archaea, bacteria, fungi, and plantae kingdoms. In additional embodiments, the heterologous nucleic acids encoding enzymes from the plantae kingdom of the mevalonic acid pathway. In other embodiments, the mevalonic acid pathway heterologous nucleic acids encoding polypeptides from the plantae kingdom have at least 70%-99% sequence identity, including 70%, 75%, 80%, 81%, 82%, 83%, 84%, 85%, 86%, 87%, 88%, 89%, 90%, 91%, 92%, 93%, 94%, 95%, 96%, 97%, 98%, 99%, and 100% sequence identity as follows:
[0095] (i) acetyl-CoA acetyltransferase comprises SEQ ID NO: 4;
[0096] (ii) 3-hydroxy-3-methylglutaryl coenzyme A synthase selected from the group consisting of SEQ ID NOs: 8-9;
[0097] (iii) 3-hydroxy-3-methylglutaryl-coenzyme A reductase selected from the group consisting of SEQ ID NOs:15, 16, 20;
[0098] (iv) mevalonate kinase, comprising SEQ ID NO:26;
[0099] (v) phosphomevalonate kinase, selected from the group consisting of SEQ ID NOs:32-33 and
[0100] (vi) mevalonate pyrophosphate decarboxylase selected from the group consisting of SEQ ID NOs:39-40; and
[0101] wherein the polypeptide retains functional activity in the MVA pathway

[0102] In other embodiments of the invention, wherein heterologous nucleic acids encoding enzymes of the methylerythritol 4-phosphate pathway are expressed, the pathway comprises nucleic acids encoding a(n) 1-deoxy-D-xylulose-5-phosphate synthase, 1-deoxy-D-xylulose 5-phosphate reductoisomerase, 4-diphosphocytidyl-2-C-methyl-D-erythritol synthase, 4-diphosphocytidyl-2-C-methyl-D-erythritol kinase, 2-C-methyl-D-erythritol 2,4-cyclodiphosphate synthase, 4-hydroxy-3-methylbut-2-en-1-yl diphosphate synthase, and 4-hydroxy-3-methylbut-2-enyl diphosphate reductase, these heterologous nucleic acids encode polypeptides from Archaea, bacteria, fungi, and plantae kingdoms. In additional embodiments, the heterologous nucleic acids encoding enzymes from the plantae kingdom. In additional embodiments, the heterologous nucleic acids encoding enzymes from the plantae kingdom of the methylerythritol 4-phosphate pathway. In other embodiments, the methylerythritol 4-phosphate pathway heterologous nucleic acids encoding polypeptides from the plantae kingdom have of the methylerythritol 4-phosphate pathway encode polypeptides having at least 70%-99% sequence identity, including 70%, 75%, 80%, 81%, 82%, 83%, 84%, 85%, 86%, 87%, 88%, 89%, 90%, 91%, 92%, 93%, 94%, 95%, 96%, 97%, 98%, 99%, and 100% sequence identity as follows:
[0103] (i) 1-deoxy-D-xylulose-5-phosphate synthase selected from the group consisting of SEQ ID NOs:41, 48-49;
[0104] (ii) 1-deoxy-D-xylulose 5-phosphate reductoisomerase selected from the group consisting of SEQ ID NOs:50, 56-58;
[0105] (iii) 4-diphosphocytidyl-2-C-methyl-D-erythritol synthase selected from the group consisting of SEQ ID NOs:59, 66-67;
[0106] (iv) 4-diphosphocytidyl-2-C-methyl-D-erythritol kinase selected from the group consisting of SEQ ID NOs:68, 73;
[0107] (v) 2-C-methyl-D-erythritol 2,4-cyclodiphosphate synthase selected from the group consisting of SEQ ID NOs:74, 80-82;
[0108] (vi) 4-hydroxy-3-methylbut-2-en-1-yl diphosphate synthase selected from the group consisting of SEQ ID NOs:83, 89; and
[0109] (vii) 4-hydroxy-3-methylbut-2-enyl diphosphate reductase selected from the group consisting of SEQ ID NOs:90, 96-97 and
[0110] wherein the polypeptide retains functional activity in the MEP pathway.
[0111] (viii) In additional embodiments of the invention, in any method wherein the method comprises expressing heterologous nucleic acids encoding polypeptides for isopentenyl-diphosphate delta-isomerase, farnesyl diphosphate synthase, and farnesene synthase, the nucleic acids encode polypeptides having at least 70%-99% sequence identity, including 70%, 75%, 80%, 81%, 82%, 83%, 84%, 85%, 86%, 87%, 88%, 89%, 90%, 91%, 92%, 93%, 94%, 95%, 96%, 97%, 98%, 99%, and 100% sequence identity as follows:
[0112] (i) isopentenyl-diphosphate delta-isomerase selected from the group consisting of SEQ ID NOs:98-101, 102-106, 188, 190-192;
[0113] (ii) farnesyl diphosphate synthase selected from the group consisting of SEQ ID NOs:107-111, 164, 165, 176, 187, 189; and
[0114] (iii) farnesene synthase selected from the group consisting of SEQ ID NOs:112-115, 116-117, 166-168 and
[0115] wherein the polypeptide retains functional activity.

[0116] In additional embodiments of the invention, in any method wherein the method comprises expressing heterologous nucleic acids encoding polypeptides for isopentenyl-diphosphate delta-isomerase, farnesyl diphosphate synthase, and farnesene synthase, the nucleic acids encode polypeptides from the plantae kingdom. In other embodiment, the isopentenyl-diphosphate delta-isomerase, farnesyl diphosphate synthase, and farnesene synthase polypeptides from the plantae kingdom have at least 70%-99% sequence identity, including 70%, 75%, 80%, 81%, 82%, 83%, 84%, 85%, 86%, 87%, 88%, 89%, 90%, 91%, 92%, 93%, 94%, 95%, 96%, 97%, 98%, 99%, and 100% sequence identity as follows:
[0117] (i) isopentenyl-diphosphate delta-isomerase, having at least 70% sequence identity to at least one amino acid sequence selected from the group consisting of SEQ ID NOs:98-101, 102-106, 188, 190-192;
[0118] (ii) farnesyl diphosphate synthase, having at least 70% sequence identity to at least one amino acid sequence selected from the group consisting of SEQ ID NOs:107-111, 164, 165, 176, 187, 189; and
[0119] (iii) farnesene synthase, having at least 70% sequence identity to at least one amino acid sequence selected from the group consisting of SEQ ID NOs:112-115, 116-117, 166-168 and
[0120] wherein the polypeptide retains a functional activity.

[0121] In any embodiments of the invention expressing heterologous nucleic acids encoding polypeptides comprising enzymes necessary to carry out the mevalonic acid pathway or the methylerythritol 4-phosphate pathway, or isopentenyl-diphosphate delta-isomerase, farnesyl diphosphate synthase, and farnesene synthase activity, at least two of the heterologous nucleic acids are introduced into the plant cell on a single recombinant DNA construct. In some embodiments, such a recombinant DNA construct may autonomously segregate to daughter cells during cell division, such as during mitosis or meiosis. In additional embodiments, the autonomously segregating recombinant DNA construct comprises a plant centromere, such as a heterologous centromere or a centromere from the same plant as the cell in which the construct is introduced. In additional embodiments, the recombinant DNA construct is a mini-chromosome. In yet other embodiments, only plasmid constructs are used; in other embodiments, a combination of mini-chromosomes and plasmid constructs are used.

[0122] In further embodiments, the methods of the invention comprise expressing from a single mini-chromosome heterologous nucleic acids encoding enzymes of the mevalonic acid pathway or the methylerythritol 4-phosphate pathway; in other embodiments, both the mevalonic acid pathway or the methylerythritol 4-phosphate pathway are expressed from a single mini-chromosome. In any of these embodiments, the mini-chromosome may further comprise heterologous nucleic acids encoding polypeptides comprising at least one enzyme selected from the group consisting of isopentenyl-diphosphate delta-isomerase, farnesyl diphosphate synthase and farnesene synthase. In yet additional embodiments, isopentenyl-diphosphate delta-isomerase, farnesyl diphosphate synthase and farnesene synthase are all expressed from the same mini-chromosome.

[0123] In further embodiments, any of the methods and compositions as described above comprise plant cells wherein the production of at least one terpenoid is increased includes plant cells selected from the group consisting of a green algae, a vegetable crop plant, a fruit crop plant, a vine crop plant, a field crop plant, a biomass plant, a bedding plant, and a tree. In other embodiments, the plant is selected from the group consisting of corn, soybean, Brassica, tomato, sorghum, sugar cane, miscanthus, guayle, switchgrass, wheat, barley, oat, rye, wheat, rice, (sugar) beet, green algae, Hevea and cotton. In some embodiments, the plant is selected from the group consisting of sorghum, sugar cane, guayule, Hevea, and (sugar) beet.

[0124] In other embodiments of the invention, any of the methods of the invention may further comprise isolating the farnesene. Such embodiments may further comprise processing the farensene into farnesane.

[0125] In yet additional embodiments, the invention comprises a plant made comprising a plant cell made by any of the methods of the invention.

[0126] In another embodiment, the invention comprises a fuel comprising a terpenoid which production is increased by any of the methods of the invention, or made by a plant cell or plant made by any of the methods of the invention. Such terpenoids comprise sesquiterpenoids, such as farnesene and farnesane.

[0127] Genes for Terpenoid Metabolic Engineering.

[0128] To maximize the production of terpenoids in plants, such as sorghum and sugar cane, the MVA pathway, or the MEP pathway, or both pathways enzymes, are simultaneously expressed in a plant cell. In addition, to propel production of sesquiterpenoids to farnesene, IFF enzymes can also be expressed in the plant cell. Exemplary polypeptides of these pathways are shown in Tables 1 (MVA), 2 (MEP) and 3 (IFF). In addition to the polypeptides contemplated in Tables 1-3 and further described in Tables 4-7, one of skill in the art will understand that other polypeptides and polynucleotides can be used that encode polypeptides having similar enzymatic activity. Furthermore, polypeptides having active domains having the enzymatic activities of the polypeptides shown in Tables 1-3 and further described in Tables 4-7 can be used, including those polypeptides having at least approximately 70%-99% amino acid sequence identity with the polypeptides listed in Table 1-3, including those having at least approximately 70%, 75%, 80%, 81%, 82%, 83%, 84%, 85%, 86%, 87%, 88%, 89%, 90%, 91%, 92%, 93%, 94%, 95%, 96%, 97%, 98%, 99%, and 100% amino acid sequence identity wherein the polypeptide retains an activity. Likewise, nucleic acid sequences encoding such functional polypeptides or active domains, including those polynucleotides derived from the amino acid sequences shown in Tables 1-3 and further described in Tables 4-7, including those polynucleotides that are codon optimized for expression in plants, such as monocots, using the OptimumGene™ Gene Design system (GenScript, New Jersy, USA; Burgess-Brown NA, Sharma S, Sobott F, Loenarz C, Oppermann U, Gileadi O. Codon optimization can improve expression of human genes in Escherichia coli: A multi-gene study. Protein Expr Purif. May 2008; 59(1): 94-102) (such polynucleotides are shown in Table 7 below) and those polynucleotides having at least approximately 70%-99% nucleic acid sequence identity to such polynucleotides derived from the amino acid sequences in Tables 1-3 and further described in Tables 4-7, (such as those shown in Table 7) including those having at least approximately 70%, 75%, 80%, 81%, 82%, 83%, 84%, 85%, 86%, 87%, 88%, 89%, 90%, 91%, 92%, 93%, 94%, 95%, 96%, 97%, 98%, 99%, and 100% nucleic acid sequence identity wherein the encoded polypeptide retains an activity. Furthermore, the genomic and non-genomic forms of such nucleic acid sequences can be used, and in some embodiments, one or the other may be advantageous.

[0129] The details for the SEQ ID NOs listed in Tables 1-3 and further described in Tables 4-7 are shown in Table 4-6, showing the sequence of an exemplary polypeptide for each class of polypeptides. The polypeptide amino acid sequences are represented by accession numbers and are from the UNIPROT database (The UniProt Consortium (2011) Ongoing and future developments at the Universal Protein Resource. Nucleic Acids Research 39 (suppl 1): D214-D219), or in some cases, and as indicated, are GenBank mRNA polynucleotide sequences which have had the longest open reading frame translated. Polynucleotides encoding the polypeptides, or active domain of such polypeptides, shown in Tables 1-3 are transformed into a plant cells; in some embodiments, the plant cells are from sugar cane or sorghum, to up-regulate terpenoid synthesis and in some embodiments, to route carbon into the production of β-farnesene-enriched resins. FIGS. 2-7 give just a few of the constructs that can be useful in the invention, using the sequences shown and described in Tables 1-7. See also the Examples for additional constructs.

TABLE 1
Mevalonic acid pathway exemplary polypeptides

| Name | SEQ ID NO |
|---|---|
| acetyl-CoA acetyltransferase | 1-4, 143 |
| 3-hydroxy-3-methylglutaryl coenzyme A synthase | 5-9, 144, 145 |
| 3-hydroxy-3-methylglutaryl-coenzyme A | 10-16, 17-20, 146-150 |
| reductase | |
| mevalonate kinase | 21-26, 151 |
| phosphomevalonate kinase | 27-33 |
| mevalonate pyrophosphate decarboxylase | 34-40, 152 |

TABLE 2
Methylerthritol 4-phosphate pathway exemplary polypeptides

| Name | SEQ ID NO |
|---|---|
| 1-deoxy-D-xyulose-5-phosphate synthase | 41-49, 153, 154, |
| | 169, 177-180 |
| 1-deoxy-D-xyulose-5-phosphate reductoisomerase | 50-58, 155, 156, |
| | 170, 181 |
| 4-diphosphocytidyl-2-C-methyl-D-erythritol synthase | 59-67, 157, 171, |
| | 182 |
| 4-diphosphocytidyl-2-C-methyl-D-erythritol kinase | 68-73, 158, 172, |
| | 183 |
| 2-C-methyl-D-erythritol 2,4-cyclodiphosphate synthase | 74-82, 159, 173, |
| | 184 |
| (E)-4-Hydroxy-3-methyl-but-2-enyl pyrophosphate | 83-89, 160, 174, |
| synthase | 185 |
| (E)-4-Hydroxy-3-methyl-but-2-enyl pyrophosphate | 90-97, 161-163, |
| reductase | 175, 186 |

TABLE 3
IFF exemplary polypeptides

| Name | SEQ ID NO |
|---|---|
| isopentenyl-diphosphate-δ-isomerase I | 98-101, 190-192 |
| isopentenyl-diphosphate-δ-isomerase II | 102-106, 188 |
| farnesyl diphosphate synthase | 107-111, 164, 165, |
| | 176, 187, 189 |
| β-farnesene synthase | 112-115, 166, 167 |
| α-farnesene synthase | 116-117, 168 |

TABLE 4
Exemplary MVA pathway sequences
Acetyl-CoA acetyltransferase
Sequence example (SEQ ID NO: 1, microbial):

| MKNCVIVSAV RTAIGSFNGS LASTSAIDLG ATVIKAAIER AKIDSQHVDE VIMGNVLQAG | | | | | | 60 | |
|---|---|---|---|---|---|---|---|
| LGQNPARQAL LKSGLAETVC GFTVNKVCGS GLKSVALAAQ AIQAGQAQSI VAGGMENMSL | | | | | | 120 | |
| APYLLDAKAR SGYRLGDGQV YDVILRDGLM CATHGYHMGI TAENVAKEYG ITREMQDELA | | | | | | 180 | |
| LHSQRKAAAA IESGAFTAEI VPVNVVTRKK TFVFSQDEFP KANSTAEALG ALRPAFDKAG | | | | | | 240 | |
| TVTAGNASGI NDGAAALVIM EESAALAAGL TPLARIKSYA SGGVPPALMG MGPVPATQKA | | | | | | 300 | |
| LQLAGLQLAD IDLIEANEAF AAQFLAVGKN LGFDSEKVNV NGGAIALGHP IGASGARILV | | | | | | 360 | |
| TLLHAMQARD KTLGLATLCI GGGQGIAMVI ERLN | | | | | | 394 | |
| SEQ ID | | | | | | | |
| NO. | Taxon | Entry | Entry name | Protein names | Organism | Length | Gene |
| 2 | Bacteria | P76461 | ATOB_ECOLI | Acetyl-CoA | Escherichia coli | 394 | atoB |
| | | | | acetyltransferase (EC | (strain K12) | | b2224 |
| | | | | 2.3.1.9) (Acetoacetyl- | | | JW2218 |
| | | | | CoA thiolase) | | | |
| 3 | Fungi | P41338 | THIL_YEAST | Acetyl-CoA | Saccharomyces | 398 | ERG10 |
| | | | | acetyltransferase (EC | cerevisiae (strain | | YPL028W |
| | | | | 2.3.1.9) (Acetoacetyl- | ATCC 204508 / | | LPB3 |
| | | | | CoA thiolase) | S288c)(Baker's | | |
| | | | | (Ergosterol | yeast) | | |
| | | | | biosynthesis protein | | | |
| | | | | 10) | | | |
| 4 | Plantae | A9ZMZ4 | A9ZMZ4_HEVBR | Acetyl-CoA C- | Hevea brasiliensis | 404 | HbAACT |
| | | | | acetyltransferase (EC | (Para rubber | | |
| | | | | 2.3.1.9) | tree)(Siphonia | | |
| | | | | | brasiliensis) | | |
| 143 | Plantae | | EZ239563 | Acetyl-coA- | Artemisia annua | 453 | |
| | | | (GenBank | acetyltransferase | | | |
| | | | mRNA | | | | |
| | | | polynuc- | | | | |
| | | | leotide | | | | |
| | | | sequence) | | | | |

3-hydroxy-3-methylglutaryl-ACP synthase pksG
Sequence example (SEQ ID NO: 5, microbial):

| MTIGIDKINF YVPKYYVDMA KLAEARQVDP NKFLIGIGQT EMAVSPVNQD IVSMGANAAK | | | | | | 60 | |
|---|---|---|---|---|---|---|---|
| DIITDEDKKK IGMVIVATES AVDAAKAAAV QIHNLLGIQP FARCFEMKEA CYAATPAIQL | | | | | | 120 | |
| AKDYLATRPN EKVLVIATDT ARYGLNSGGE PTQGAGAVAM VIAHNPSILA LNEDAVAYTE | | | | | | 180 | |
| DVYDFWRPTG HKYPLVDGAL SKDAYIRSFQ QSWNEYAKRQ GKSLADFASL CFHVPFTKMG | | | | | | 240 | |
| KKALESIIDN ADETTQERLR SGYEDAVDYN RYVGNIYTGS LYLSLISLLE NRDLQAGETI | | | | | | 300 | |
| GLFSYGSGSV GEFYSATLVE GYKDHLDQAA HKALLNNRTE VSVDAYETFF KRFDDVEFDE | | | | | | 360 | |
| EQDAVHEDRH IFYLSNIENN VREYHRPE | | | | | | 388 | |
| SEQ ID | | | | | | | |
| NO: | Taxon | Entry | Entry name | Protein names | Organism | Length | Gene |
| 6 | Bacteria | Q99R90 | Q99R90_STAAM | 3-hydroxy-3- | Staphylococcus | 388 | mvaSSAV2546 |
| | | | | methylglutaryl CoA | aureus (strain | | |
| | | | | synthase | Mu50 / ATCC | | |
| | | | | | 700699) | | |
| 7 | Fungi | P54839 | HMCS_YEAST | Hydroxymethylglutaryl- | Saccharomyces | 491 | ERG13 |
| | | | | CoA synthase | cerevisiae (strain | | HMGS |
| | | | | (HMG-CoA synthase) | ATCC 204508/ | | YML126C |
| | | | | (EC 2.3.3.10) (3- | S288c)(Baker's | | YM4987.09C |
| | | | | hydroxy-3- | yeast) | | |
| | | | | methylglutaryl | | | |
| | | | | coenzyme A | | | |
| | | | | synthase) | | | |
| 8 | Plantae | Q944F8 | Q944F8_HEVBR | Hydroxymethylglutaryl | Hevea brasiliensis | 464 | |
| | | | | coenzyme A | (Para rubber | | |
| | | | | synthase | tree)(Siphonia | | |
| | | | | | brasiliensis) | | |
| 9 | Plantae | Q6QLW8 | Q6QLW8_HEVBR | HMG-CoA synthase 2 | Hevea brasiliensis | 464 | HMGS2 |
| | | | | | (Para rubber | | |
| | | | | | tree)(Siphonia | | |
| | | | | | brasiliensis) | | |
| 144 | Plantae | D2WS91 | D2WS91_ARTAN | HMG-CoA-synthase- | Artemisia annua | 458 | |
| | | | | 1 | | | |
| 145 | Plantae | | ACY74340.1 | HMG-CoA synthase-2 | Artemisia annua | 458 | |
| | | | (GenBank) | | | | |

3-hydroxy-3-methylglutaryl-coenzyme A reductase
Sequence example (SEQ ID NO: 10, microbial):

| MVLTNKTVIS GSKVKSLSSA QSSSSGPSSS SEEDDSRDIE SLDKKIRPLE ELEALLSSGN | | | | | | 60 | |
|---|---|---|---|---|---|---|---|
| TKQLKNKEVA ALVIHGKLPL YALEKKLGDT TRAVAVRRKA LSILAEAPVL ASDRLPYKNY | | | | | | 120 | |
| DYDRVFGACC ENVIGYMPLP VGVIGPLVID GTSYHIPMAT IEGCLVASAM RGCKAINAGG | | | | | | 180 | |
| GATTVLTKDG MIRGPVVRFP TLKRSGACKI WLDSEEGQNA IKKAFNSTSR FARLQHIQTC | | | | | | 240 | |
| LAGDLLFMRF RTTTGDAMGM NMISKGVEYS LKQMVEEYGW EDMEVVSVSG NYCIDKKPAA | | | | | | 300 | |
| INWIEGRGKS VVAEATIPGD VVRKVLKSDV SALVELNIAK NLVGSAMAGS VGGFNAHAAN | | | | | | 360 | |
| LVTAVFLALG QDPAQNVESS NCITLMKEVD GDLRISVSMP SIEVGTIGGG IVLEPQGAML | | | | | | 420 | |
| DLLGVRGPHA TAPGTNARQL ARIVACAVLA GELSLCAALA AGHLVQSHMT HNRKPAEPTK | | | | | | 480 | |
| PNNLDATDIN RLKDGSVTCI KS | | | | | | 502 | |
| SEQ ID | | | | | | | |
| NO: | Taxon | Entry | Entry name | Protein names | Organism | Length | Gene |
| 11 | Bacteria | Q5KSM8 | Q5KSM8_9ACTO | 3-hydroxy-3- | Streptomyces sp. | 353 | hmgr |
| | | | | methylglutaryl-CoA | KO-3988 | | |
| | | | | reductase | | | |
| 12 | Bacteria | B2HGT7 | B2HGT7_MYCMM | Hydroxymethylglutaryl- | Mycobacterium | 351 | MMAR_3214 |
| | | | | coenzyme A | marinum (strain | | |
| | | | | (HMG-CoA) | ATCC BAA-535 / | | |
| | | | | reductase | M) | | |
| 13 | Bacteria | A1ZZS8 | A1ZZS8_9BACT | Hydroxymethylglutaryl- | Microscilla | 424 | M23134_ |
| | | | | coenzyme A | marina ATCC | | 02465 |
| | | | | reductase (EC | 23134 | | |
| | | | | 1.1.1.34) | | | |
| 14 | Fungi | P12683 | HMDH1_YEAST | 3-hydroxy-3- | Saccharomyces | 1054 | HMG1YML075C |
| | | | | methylglutaryl- | cerevisiae (strain | | |
| | | | | coenzyme A | ATCC 204508 / | | |
| | | | | reductase 1 (HMG- | S288c)(Baker's | | |
| | | | | CoA reductase 1)(EC | yeast) | | |
| | | | | 1.1.1.34) | | | |
| 15 | Plantae | A9ZMZ9 | A9ZMZ9_HEVBR | Hydroxymethylglutaryl- | Hevea brasiliensis | 606 | HbHMGR |
| | | | | CoA reductase (EC | (Para rubber | | |
| | | | | 1.1.1.34) | tree)(Siphonia | | |
| | | | | | brasiliensis) | | |
| 16 | Plantae | Q00583 | HMDH3_HEVBR | 3-hydroxy-3- | Hevea brasiliensis | 586 | HMGR3 |
| | | | | methylglutaryl- | (Para rubber | | |
| | | | | coenzyme A | tree)(Siphonia | | |
| | | | | reductase 3 (HMG- | brasiliensis) | | |
| | | | | CoA reductase 3)(EC | | | |
| | | | | 1.1.1.34) | | | |
| 146 | Plantae | Q9SWQ3 | Q9SWQ3_ARTAN | 3-hydroxy-3- | Artemisia annua | 567 | |
| | | | | methylglutaryl- | | | |
| | | | | coenzyme A | | | |
| | | | | reductase | | | |

3-hydroxy-3-methylglutaryl-coenzyme A reductase
Sequence example (SEQ ID NO: 15, microbial):

| MQSLDKNFRH LSRQQKLQQL VDKQWLSEDQ FDILLNHPLI DEEVANSLIE NVIAQGALPV | | | | | | 60 | |
|---|---|---|---|---|---|---|---|
| GLLPNIIVDD KAYVVPMMVE EPSVVAAASY GAKLVNQTGG FKTVSSERIM IGQIVFDGVD | | | | | | 120 | |
| DTEKLSADIK ALEKQIHKIA DEAYPSIKAR GGGYQRIAID TFPEQQLLSL KVFVDTKDAM | | | | | | 180 | |
| GANMLNTILE AITAFLKNES PQSDILMSIL SNHATASVVK VQGEIDVKDL ARGERTGEEV | | | | | | 240 | |
| AKRMERASVL AQVDIHRAAT HNKGVMNGIH AVVLATGNDT RGAEASAHAY ASRDGQYRGI | | | | | | 300 | |
| ATWRYDQKRQ RLIGTIEVPM TLAIVGGGTK VLPIAKASLE LLNVDSAQEL GHVVAAVGLA | | | | | | 360 | |
| QNFAACRALV SEGIQQGHMS LQYKSLAIVV GAKGDEIAQV AEALKQEPRA NTQVAERILQ | | | | | | 420 | |
| EIRQQ | | | | | | 425 | |
| SEQ ID | | | | | | | |
| NO: | Taxon | Entry | Entry name | Protein names | Organism | Length | Gene |
| 18 | Bacteria | Q9FD86 | Q9FD86_STAAU | HMG-CoA reductase | Staphylococcus | 425 | mvaA |
| | | | | | aureus | | |
| 19 | Fungi | P12683 | HMDH1_YEAST | 3-hydroxy-3- | Saccharomyces | 1054 | HMG1YML075C |
| | | | | methylglutaryl- | cerevisiae (strain | | |
| | | | | coenzyme A | ATCC 204508 / | | |
| | | | | reductase 1 (HMG- | S288c)(Baker's | | |
| | | | | CoA reductase 1)(EC | yeast) | | |
| | | | | 1.1.1.34) | | | |
| 20 | Plantae | Q00583 | HMDH3_HEVBR | 3-hydroxy-3- | Hevea brasiliensis | 586 | HMGR3 |
| | | | | methylglutaryl- | (Para rubber | | |
| | | | | coenzyme A | tree)(Siphonia | | |
| | | | | reductase 3 (HMG- | brasiliensis) | | |
| | | | | CoA reductase 3)(EC | | | |
| | | | | 1.1.1.34) | | | |
| 147 | Plantae | Q43318 | Q43318_ARTAN | 3-hydroxy-3- | Artemisia annua | 566 | |
| | | | | methylglutaryl- | | | |
| | | | | coenzyme A | | | |
| | | | | reductase | | | |
| 148 | Plantae | Q43319 | Q43319_ARTAN | 3-hydroxy-3- | Artemisia annua | 560 | |
| | | | | methylglutaryl- | | | |
| | | | | coenzyme A | | | |
| | | | | reductase | | | |
| 149 | Plantae | | EZ228778.1 | 3-hydroxy-3- | Artemisia annua | 565 | |
| | | | (GenBank | methylglutaryl- | | | |
| | | | mRNA | coenzyme A | | | |
| | | | polynuc- | reductase-1 | | | |
| | | | leotide | | | | |
| | | | sequence) | | | | |
| 150 | Plantae | | EZ235445 | 3-hydroxy-3- | Artemisia annua | 585 | |
| | | | (GenBank | methylglutaryl- | | | |
| | | | mRNA | coenzyme A | | | |
| | | | polynuc- | reductase-3 | | | |
| | | | leotide | | | | |
| | | | sequence) | | | | |

Mevalonate kinase
Sequence example (SEQ ID NO: 21, microbial):

| MSLPFLTSAP GKVIIFGEHS AVYNKPAVAA SVSALRTYLL ISESSAPDTI ELDFPDISFN | | | | | | 60 | |
|---|---|---|---|---|---|---|---|
| HKWSINDFNA ITEDQVNSQK LAKAQQATDG LSQELVSLLD PLLAQLSESF HYHAAFCFLY | | | | | | 120 | |
| MFVCLCPHAK NIKFSLKSTL PIGAGLGSSA SISVSLALAM AYLGGLIGSN DLEKLSENDK | | | | | | 180 | |
| HIVNQWAFIG EKCIHGTPSG IDNAVATYGN ALLFEKDSHN GTINTNNFKF LDDFPAIPMI | | | | | | 240 | |
| LTYTRIPRST KDLVARVRVL VTEKFPEVMK PILDAMGECA LQGLEIMTKL SKCKGTDDEA | | | | | | 300 | |
| VETNNELYEQ LLELIRINHG LLVSIGVSHP GLELIKNLSD DLRIGSTKLT GAGGGGCSLT | | | | | | 360 | |
| LLRRDITQEQ IDSFKKKLQD DFSYETFETD LGGTGCCLLS AKNLNKDLKI KSLVFQLFEN | | | | | | 420 | |
| KTTTKQQIDD LLLPGNTNLP WTS | | | | | | 443 | |
| SEQ ID | | | | | | | |
| NO: | Taxon | Entry | Entry name | Protein names | Organism | Length | Gene |
| 22 | Bacteria | E8N5A6 | E8N5A6_ANATU | Mevalonate kinase | Anaerolinea | 313 | mvk |
| | | | | (EC 2.7.1.36) | thermophila | | ANT_ 159 |
| | | | | | (strain DSM | 40 | |
| | | | | | 14523 /JCM | | |
| | | | | | 11388 / NBRC | | |
| | | | | | 100420 / UNI-1) | | |
| 23 | Bacteria | A6G138 | A6G138_9DELT | Mevalonate kinase | Plesiocystis | 320 | PPSIR1_1175 |
| | | | | | pacifica SIR-1 | | |
| 24 | Bacteria | A9AY65 | A9AY65_HERA2 | Mevalonate kinase | Herpetosiphon | 313 | Haur_4315 |
| | | | | | aurantiacus | | |
| | | | | | (strain ATCC | | |
| | | | | | 23779 / DSM | | |
| | | | | | 785) | | |
| 25 | Fungi | P07277 | KIME_YEAST | Mevalonate kinase | Saccharomyces | 443 | ERG12 |
| | | | | (MK)(MvK)(EC | cerevisiae (strain | | RAR1 |
| | | | | 2.7.1.36) (Ergosterol | ATCC 204508 / | | YMR208W |
| | | | | biosynthesis protein | S288c)(Baker's | | YM8261.02 |
| | | | | 12) (Regulation of | yeast) | | |
| | | | | autonomous | | | |
| | | | | replication protein 1) | | | |
| 26 | Plantae | Q944G2 | Q944G2_HEVBR | Mevalonate kinase | Hevea brasiliensis | 386 | HbMVK |
| | | | | | (Para rubber | | |
| | | | | | tree)(Siphonia | | |
| | | | | | brasiliensis) | | |
| 151 | Plantae | | EZ251421 | Mevalonate kinase | Artemisia annua | 389 | |
| | | | (GenBank | | | | |
| | | | mRNA | | | | |
| | | | polynuc- | | | | |
| | | | leotide | | | | |
| | | | sequence) | | | | |

Phosphomevalonate kinase
Sequence example (SEQ ID NO: 27, microbial):

| MSELRAFSAP GKALLAGGYL VLDPKYEAFV VGLSARMHAV AHPYGSLQES DKFEVRVKSK | | | | | | 60 | |
|---|---|---|---|---|---|---|---|
| QFKDGEWLYH ISPKTGFIPV SIGGSKNPFI EKVIANVFSY FKPNMDDYCN RNLFVIDIFS | | | | | | 120 | |
| DDAYHSQEDS VTEHRGNRRL SFHSHRIEEV PKTGLGSSAG LVTVLTTALA SFFVSDLENN | | | | | | 180 | |
| VDKYREVIHN LSQVAHCQAQ GKIGSGFDVA AAAYGSIRYR RFPPALISNL PDIGSATYGS | | | | | | 240 | |
| KLAHLVNEED WNITIKSNHL PSGLTLWMGD IKNGSETVKL VQKVKNWYDS HMPESLKIYT | | | | | | 300 | |
| ELDHANSRFM DGLSKLDRLH ETHDDYSDQI FESLERNDCT CQKYPEITEV RDAVATIRRS | | | | | | 360 | |
| FRKITKESGA DIEPPVQTSL LDDCQTLKGV LTCLIPGAGG YDAIAVIAKQ DVDLRAQTAD | | | | | | 420 | |
| DKRFSKVQWL DVTQADWGVR KEKDPETYLD K | | | | | | 451 | |
| SEQ ID | | | | | | | |
| NO | Taxon | Entry | Entry name | Protein names | Organism | Length | Gene |
| 28 | Bacteria | C2ES75 | C2ES75_9LACO | Phosphomevalonate | Lactobacillus | 376 | HMPREF0549_ |
| | | | | kinase (EC 2.7.4.2) | vaginalis ATCC | | 0311 |
| | | | | | 49540 | | |
| 29 | Bacteria | C8P8V5 | C8P8V5_9LACO | Phosphomevalonate | Lactobacillus | 377 | mvaK |
| | | | | kinase (EC 2.7.4.2) | antri DSM 16041 | | HMPREF0494_ |
| | | | | | | | 1749 |
| 30 | Bacteria | COWXW9 | COWXW9_LACFE | Phosphomevalonate | Lactobacillus | 369 | HMPREF0511_ |
| | | | | kinase | fermentum ATCC | | 0970 |
| | | | | | 14931 | | |
| 31 | Fungi | A6ZMT2 | A6ZMT2_YEAS7 | Phosphomevalonate | Saccharomyces | 451 | ERG8SCY_ |
| | | | | kinase | cerevisiae (strain | | 4398 |
| | | | | | YJM789)(Baker's | | |
| | | | | | yeast) | | |
| 32 | Plantae | Q944G1 | Q944G1_HEVBR | Phosphomevalonate | Hevea brasiliensis | 503 | |
| | | | | kinase | (Para rubber | | |
| | | | | | tree)(Siphonia | | |
| | | | | | brasiliensis) | | |
| 33 | Plantae | A9ZN02 | A9ZN02_HEVBR | 5- | Hevea brasiliensis | 503 | HbMVD |
| | | | | phosphomevelonate | (Para rubber | | |
| | | | | kinase (EC 2.7.4.2) | tree)(Siphonia | | |
| | | | | | brasiliensis) | | |

Mevalonate pyrophosphate decarboxylase
Sequence examples (SEQ ID NO: 34, microbial):

| MTVYTASVTA PVNIATLKYW GKRDTKLNLP TNSSISVTLS QDDLRTLTSA ATAPEFERDT | | | | | | 60 | |
|---|---|---|---|---|---|---|---|
| LWLNGEPHSI DNERTQNCLR DLRQLRKEME SKDASLPTLS QWKLHIVSEN NFPIAAGLAS | | | | | | 120 | |
| SAAGFAALVS AIAKLYQLPQ STSEISRIAR KGSGSACRSL FGGYVAWEMG KAEDGHDSMA | | | | | | 180 | |
| VQIADSSDWP QMKACVLVVS DIKKDVSSTQ GMQLTVATSE LFKERIEHVV PKRFEVMRKA | | | | | | 240 | |
| IVEKDFATFA KETMMDSNSF HATCLDSFPP IFYMNDTSKR IISWCHTINQ FYGETIVAYT | | | | | | 300 | |
| FDAGPNAVLY YLAENESKLF AFIYKLFGSV PGWDKKFTTE QLEAFNHQFE SSNFTARELD | | | | | | 360 | |
| LELQKDVARV ILTQVGSGPQ ETNESLIDAK TGLPKE | | | | | | 396 | |
| SEQ ID | | | | | | | |
| NO | Taxon | Entry | Entry name | Protein names | Organism | Length | Gene |
| 35 | Bacteria | Q8ETN2 | Q8ETN2_OCEIH | Mevalonate | Oceanobacillus | 324 | OB0226 |
| | | | | diphosphate | iheyensis (strain | | |
| | | | | decarboxylase | DSM 14371 /JCM | | |
| | | | | | 11309 / KCTC | | |
| | | | | | 3954 / HTE831) | | |
| 36 | Bacteria | E8N6F3 | E8N6F3_ANATU | Diphosphomevalonate | Anaerolinea | 326 | mvaD |
| | | | | decarboxylase (EC | thermophila | | ANT_19910 |
| | | | | 4.1.1.33) | (strain DSM | | |
| | | | | | 14523 /JCM | | |
| | | | | | 11388 / NBRC | | |
| | | | | | 100420 / UNI-1) | | |
| 37 | Bacteria | C1PCJ6 | C1PCJ6_BACCO | Diphosphomevalonate | Bacillus | 326 | BcoaDRAFT_ |
| | | | | decarboxylase (EC | coagulans 36D1 | | 4576 |
| | | | | 4.1.1.33) | | | |
| 38 | Fungi | P32377 | MVD1_YEAST | Diphosphomevalonate | Saccharomyces | 396 | MVD1 |
| | | | | decarboxylase (EC | cerevisiae (strain | | ERG19 |
| | | | | 4.1.1.33) (Ergosterol | ATCC 204508 / | | MPD |
| | | | | biosynthesis protein | S288c)(Baker's | | YNR043W |
| | | | | 19)(Mevalonate | yeast) | | N3427 |
| | | | | pyrophosphate | | | |
| | | | | decarboxylase) | | | |
| | | | | (Mevalonate-5- | | | |
| | | | | diphosphate | | | |
| | | | | decarboxylase) | | | |
| | | | | (MDD)(MDDase) | | | |
| 39 | Plantae | Q944G0 | Q944G0_HEVBR | Mevalonate | Hevea brasiliensis | 415 | |
| | | | | disphosphate | (Para rubber | | |
| | | | | decarboxylase | tree)(Siphonia | | |
| | | | | | brasiliensis) | | |
| 40 | Plantae | A9ZN03 | A9ZN03_HEVBR | Diphosphomevelona | Hevea brasiliensis | 415 | HbPMD |
| | | | | to decarboxylase (EC | (Para rubber | | |
| | | | | 4.1.1.33) | tree)(Siphonia | | |
| | | | | | brasiliensis) | | |
| 152 | Plantae | | EZ207331 | Mevalonate | Artemisia annua | 414 | |
| | | | (GenBank | diphosphate | | | |
| | | | mRNA | decarboxylase | | | |
| | | | polynucleo- | | | | |
| | | | tide sequence) | | | | |

TABLE 5
Exemplary MEP pathway sequences
Deoxyxylulose-5-phosphate synthase
Sequence example (SEQ ID NO: 41, Arabidopsis thaliana):

| MASSAFAFPS YIITKGGLST DSCKSTSLSS SRSLVTDLPS PCLKPNNNSH SNRRAKVCAS | | | | | | 60 | |
|---|---|---|---|---|---|---|---|
| LAEKGEYYSN RPPTPLLDTI NYPIHMKNLS VKELKQLSDE LRSDVIFNVS KTGGHLGSSL | | | | | | 120 | |
| GVVELTVALH YIFNTPQDKI LWDVGHQSYP HKILTGRRGK MPTMRQTNGL SGFTKRGESE | | | | | | 180 | |
| HDCFGTGHSS TTISAGLGMA VGRDLKGKNN NVVAVIGDGA MTAGQAYEAM NNAGYLDSDM | | | | | | 240 | |
| IVILNDNKQV SLPTATLDGP SPPVGALSSA LSRLQSNPAL RELREVAKGM TKQIGGPMHQ | | | | | | 300 | |
| LAAKVDEYAR GMISGTGSSL FEELGLYYIG PVDGHNIDDL VAILKEVKST RTTGPVLIHV | | | | | | 360 | |
| VTEKGRGYPY AERADDKYHG VVKFDPATGR QFKTTNKTQS YTTYFAEALV AEAEVDKDVV | | | | | | 420 | |
| AIHAAMGGGT GLNLFQRRFP TRCFDVGIAE QHAVTFAAGL ACEGLKPFCA IYSSFMQRAY | | | | | | 480 | |
| DQVVHDVDLQ KLPVRFAMDR AGLVGADGPT HCGAFDVTFM ACLPNMIVMA PSDEADLFNM | | | | | | 540 | |
| VATAVAIDDR PSCFRYPRGN GIGVALPPGN KGVPIEIGKG RILKEGERVA LLGYGSAVQS | | | | | | 600 | |
| CLGAAVMLEE RGLNVTVADA RFCKPLDRAL IRSLAKSHEV LITVEEGSIG GFGSHVVQFL | | | | | | 660 | |
| ALDGLLDGKL KWRPMVLPDR YIDHGAPADQ LAEAGLMPSH IAATALNLIG APREALF | | | | | | 717 | |
| SEQ ID | | | | | | | |
| NO: | Taxon | Entry | Entry name | Protein names | Organism | Length | Gene |
| 42 | Bacteria | A8U2Y0 | A8U2Y0_ | 1-deoxy-D-xylulose- | Alpha | 638 | dxs |
| | | | 9PROT | 5-phosphate | proteobacterium | | BAL199_2_ |
| | | | | synthase (EC 2.2.1.7) | BAL199 | | 2207 |
| | | | | (1-deoxyxylulose-5- | | | |
| | | | | phosphate synthase) | | | |
| 43 | Bacteria | A7HR71 | A7HR71_ | 1-deoxy-D-xylulose- | Parvibaculum | 650 | dxs |
| | | | PARL1 | 5-phosphate | lavamentivorans | | Plav_0781 |
| | | | | synthase (EC 2.2.1.7) | (strain DS-1 / | | |
| | | | | (1-deoxyxylulose-5- | DSM 13023 / | | |
| | | | | phosphate synthase) | NCIMB 13966) | | |
| 44 | Bacteria | Q2W367 | DXS_MAGSA | 1-deoxy-D-xylulose- | Magnetospirillum | 644 | dxs |
| | | | | 5-phosphate | magneticum | | amb2904 |
| | | | | synthase (EC 2.2.1.7) | (strain AMB-1 / | | |
| | | | | (1-deoxyxylulose-5- | ATCC 700264) | | |
| | | | | phosphate synthase) | | | |
| | | | | (DXP synthase) | | | |
| | | | | (DXPS) | | | |
| 45 | Fungi | C4Y4H6 | C4Y4H6_ | Putative | Clavispora | 362 | CLUG_ |
| | | | CLAL4 | uncharacterized | lusitaniae (strain | | 02548 |
| | | | | protein | ATCC 42720) | | |
| | | | | | (Yeast)(Candida | | |
| | | | | | lusitaniae) | | |
| 46 | Fungi | F9FXE5 | F9FXE5_ | Putative | Fusarium | 404 | FOXB_ |
| | | | FUSOX | uncharacterized | oxysporum | | 11077 |
| | | | | protein | Fo5176 | | |
| 47 | Fungi | Q5A5V6 | Q5A5V6_ | Putative | Candida albicans | 379 | PDB1 |
| | | | CANAL | uncharacterized | (strain SC5314 / | | CaO19.12753 |
| | | | | protein PDB1 | ATCC MYA-2876) | | CaO19.5294 |
| | | | | | (Yeast) | | |
| 48 | Plantae | A9ZN06 | A9ZN06_HEVBR | 1-deoxy-D-xylulose | Hevea brasiliensis | 720 | HbDXS1 |
| | | | | 5-phosphate | (Para rubber | | |
| | | | | synthase (EC 2.2.1.7) | tree)(Siphonia | | |
| | | | | | brasiliensis) | | |
| 49 | Plantae | A1KXW4 | A1KXW4_HEVBR | Putative 1-deoxy-D- | Hevea brasiliensis | 720 | DXS |
| | | | | xylulose 5-phosphate | (Para rubber | | |
| | | | | synthase | tree)(Siphonia | | |
| | | | | | brasiliensis) | | |
| 153 | Plantae | Q9SP65 | Q9SP65_ARTAN | 1-deoxy-D-xylulose | Artemisia annua | 713 | |
| | | | | 5-phosphate | | | |
| | | | | synthase | | | |
| 154 | Plantae | | EZ167196 | 1-deoxy-D-xylulose | Artemisia annua | 728 | |
| | | | (Genbank | 5-phosphate | | | |
| | | | polynucleo- | synthase | | | |
| | | | tide mRNA | | | | |
| | | | sequence) | | | | |
| 169 | Bacteria | | AAC73523 | 1-deoxy-D-xylulose | E. coli | 620 | |
| | | | (GenBank | 5-phosphate | | | |
| | | | polynucleo- | synthase | | | |
| | | | tide sequence) | | | | |
| 177 | Algae | O81954 | 081954_CHRLE | 1-deoxy-D-xylulose | Chlamydomonas | 735 | |
| | | | | 5-phosphate | reinhardtii | | |
| | | | | synthase | | | |
| 178 | Algae | | AEZ35185 | 1-deoxy-D-xylulose | Botryococcus | 770 | |
| | | | (GenBank | 5-phosphate | braunii | | |
| | | | polynucleo- | synthase | | | |
| | | | tide sequence) | | | | |
| 179 | Algae | | AEZ35186 | 1-deoxy-D-xylulose | Botryococcus | 771 | |
| | | | (GenBank | 5-phosphate | braunii | | |
| | | | polynucleo- | synthase | | | |
| | | | tide sequence) | | | | |
| 180 | Algae | | AEZ35187 | 1-deoxy-D-xylulose | Botryococcus | 730 | |
| | | | (GenBank | 5-phosphate | braunii | | |
| | | | polynucleo- | synthase | | | |
| | | | tide sequence) | | | | |

1-deoxy-D-xylulose 5-phosphate reductoisomerase
Sequence example (SEQ ID NO: 50, Arabidopsis thaliana):

| MMTLNSLSPA ESKAISFLDT SRFNPIPKLS GGFSLRRRNQ GRGFGKGVKC SVKVQQQQQP | | | | | | 60 | |
|---|---|---|---|---|---|---|---|
| PPAWPGRAVP EAPRQSWDGP KPISIVGSTG SIGTQTLDIV AENPDKFRVV ALAAGSNVTL | | | | | | 120 | |
| LADQVRRFKP ALVAVRNESL INELKEALAD LDYKLEIIPG EQGVIEVARH PEAVTVVTGI | | | | | | 180 | |
| VGCAGLKPTV AAIEAGKDIA LANKETLIAG GPFVLPLANK HNVKILPADS EHSAIFQCIQ | | | | | | 240 | |
| GLPEGALRKI ILTASGGAFR DWPVEKLKEV KVADALKHPN WNMGKKITVD SATLFNKGLE | | | | | | 300 | |
| VIEAHYLFGA EYDDIEIVIH PQSIIHSMIE TQDSSVLAQL GWPDMRLPIL YTMSWPDRVP | | | | | | 360 | |
| CSEVTWPRLD LCKLGSLTFK KPDNVKYPSM DLAYAAGRAG GTMTGVLSAA NEKAVEMFID | | | | | | 420 | |
| EKISYLDIFK VVELTCDKHR NELVTSPSLE EIVHYDLWAR EYAANVQLSS GARPVHA | | | | | | 477 | |
| SEQ ID | | | | | | | |
| NO: | Taxon | Entry | Entry name | Protein names | Organism | Length | Gene |
| 51 | Bacteria | D8FYL0 | D8FYL0_9CYAN | 1-deoxy-D-xylulose | Oscillatoria sp. | 396 | dxr |
| | | | | 5-phosphate | PCC 6506 | | OSCI_1910010 |
| | | | | reductoisomerase | | | |
| | | | | (DXP | | | |
| | | | | reductoisomerase) | | | |
| | | | | (EC 1.1.1.267) (1- | | | |
| | | | | deoxyxylulose-5- | | | |
| | | | | phosphate | | | |
| | | | | reductoisomerase) | | | |
| | | | | (2-C-methyl-D- | | | |
| | | | | erythritol 4- | | | |
| | | | | phosphate synthase) | | | |
| 52 | Bacteria | D7E0Y7 | D7E0Y7_NOSA0 | 1-deoxy-D-xylulose | Nostoc azollae | 398 | dxr |
| | | | | 5-phosphate | (strain 0708) | | Aazo_0646 |
| | | | | reductoisomerase | (Anabaena | | |
| | | | | (DXP | azollae (strain | | |
| | | | | reductoisomerase) | 0708)) | | |
| | | | | (EC 1.1.1.267) (1- | | | |
| | | | | deoxyxylulose-5- | | | |
| | | | | phosphate | | | |
| | | | | reductoisomerase) | | | |
| | | | | (2-C-methyl-D- | | | |
| | | | | erythritol 4- | | | |
| | | | | phosphate synthase) | | | |
| 53 | Bacteria | B4WQ44 | B4WQ44_9SYNE | 1-deoxy-D-xylulose | Synechococcus | 389 | dxr |
| | | | | 5-phosphate | sp. PCC 7335 | | S7335_4035 |
| | | | | reductoisomerase | | | |
| | | | | (DXP | | | |
| | | | | reductoisomerase) | | | |
| | | | | (EC 1.1.1.267) (1- | | | |
| | | | | deoxyxylulose-5- | | | |
| | | | | phosphate | | | |
| | | | | reductoisomerase) | | | |
| | | | | (2-C-methyl-D- | | | |
| | | | | erythritol 4- | | | |
| | | | | phosphate synthase) | | | |
| 54 | Fungi | Q4PFD0 | Q4PFD0_USTMA | Putative | Ustilago maydis | 1692 | UM01183.1 |
| | | | | uncharacterized | (strain 521 / FGSC | | |
| | | | | protein | 9021)(Smut | | |
| | | | | | fungus) | | |
| 55 | Fungi | Q96UP6 | RAD52_EMENI | DNA repair and | Emericella | 582 | radC |
| | | | | recombination | nidulans | | AN4407 |
| | | | | protein radC (RAD52 | (Aspergillus | | |
| | | | | homolog) | nidulans) | | |
| 56 | Plantae | Q0GYS3 | Q0GYS3_HEVBR | 1-deoxy-D-xylulose | Hevea brasiliensis | 471 | DXR |
| | | | | 5-phosphate | (Para rubber | | DXR2 |
| | | | | reductoisomerase | tree)(Siphonia | | |
| | | | | (Putative 1-deoxy-D- | brasiliensis) | | |
| | | | | xylulose 5-phosphate | | | |
| | | | | reductoisomerase) | | | |
| 57 | Plantae | A9ZN08 | A9ZN08_HEVBR | 1-deoxy-D-xylulose- | Hevea brasiliensis | 471 | HbDXR |
| | | | | 5-phosphate | (Para rubber | | |
| | | | | reductoisomerase | tree)(Siphonia | | |
| | | | | (EC 1.1.1.267) | brasiliensis) | | |
| 58 | Plantae | A1KXW2 | A1KXW2_HEVBR | 1-deoxy-D-xylulose | Hevea brasiliensis | 471 | DXR |
| | | | | 5-phosphate | (Para rubber | | |
| | | | | reductoisomerase | tree)(Siphonia | | |
| | | | | | brasiliensis) | | |
| 155 | Plantae | Q9SP64 | Q9SP64_ARTAN | 1-deoxy-D-xylulose | Artemisia annua | 472 | |
| | | | | 5-phosphate | | | |
| | | | | reductoisomerase | | | |
| 156 | Plantae | | EZ240020 | 1-deoxy-D-xylulose | Artemisia annua | 453 | |
| | | | (GenBank | 5-phosphate | | | |
| | | | mRNA | reductoisomerase | | | |
| | | | polynucleo- | | | | |
| | | | tide sequence) | | | | |
| 170 | Bacteria | | AAC73284 | 1-deoxy-D-xylulose | E. coli | 398 | |
| | | | (GenBank | 5-phosphate | | | |
| | | | polynucleo- | reductoisomerase | | | |
| | | | tide sequence) | | | | |
| 181 | Algae | | KA123067 | 1-deoxy-D-xylulose | Botrycoccus | 479 | |
| | | | (GenBank | 5-phosphate | braunii | | |
| | | | polynucleo- | reductoisomerase | | | |
| | | | tide sequence) | | | | |

2-C-methyl-D-erythritol 4-phosphate cytidylyltransferase
Sequence example (SEQ ID NO: 59, Arabidopsis thaliana):

| MAMLQTNLGF ITSPTFLCPK LKVKLNSYLW FSYRSQVQKL DFSKRVNRSY KRDALLLSIK | | | | | | 60 | |
|---|---|---|---|---|---|---|---|
| CSSSTGFDNS NVVVKEKSVS VILLAGGQGK RMKMSMPKQY IPLLGQPIAL YSFFIFSRMP | | | | | | 120 | |
| EVKEIVVVCD PFFRDIFEEY EESIDVDLRF AIPGKERQDS VYSGLQEIDV NSELVCIHDS | | | | | | 180 | |
| ARPLVNTEDV EKVLKDGSAV GAAVLGVPAK ATIKEVNSDS LVVKTLDRKT LWEMQTPQVI | | | | | | 240 | |
| KPELLKKGFE LVKSEGLEVT DDVSIVEYLK HPVYVSQGSY TNIKVTTPDD LLLAERILSE | | | | | | 300 | |
| DS | | | | | | 302 | |
| SEQ ID | | | | | | | |
| NO: | Taxon | Entry | Entry name | Protein names | Organism | Length | Gene |
| 60 | Bacteria | F8KVL1 | F8KVL1_PARAV | 2-C-methyl-D- | Parachlamydia | 229 | isPD ispD |
| | | | | erythritol 4- | acanthamoebae | | PUV_01970 |
| | | | | phosphate | (strain UV7) | | |
| | | | | cytidylyltransferase | | | |
| | | | | (EC 2.7.7.60)(4- | | | |
| | | | | diphosphocytidy1-2C- | | | |
| | | | | methyl-D-erythritol | | | |
| | | | | synthase)(MEP | | | |
| | | | | cytidylyltransferase) | | | |
| 61 | Bacteria | F8L5L7 | F8L5L7_SIMNZ | 2-C-methyl-D- | Simkania | 226 | isPD |
| | | | | erythritol 4- | negevensis | | ispD1 |
| | | | | phosphate | (strain ATCC VR- | | SNE_A18880 |
| | | | | cytidylyltransferase 1 | 1471 / Z) | | |
| | | | | (EC 2.7.7.60)(4- | | | |
| | | | | diphosphocytidy1-2C- | | | |
| | | | | methyl-D-erythritol | | | |
| | | | | synthase 1)(MEP | | | |
| | | | | cytidylyltransferase | | | |
| | | | | 1) | | | |
| 62 | Bacteria | Q6MEE8 | ISPD_PARUW | 2-C-methyl-D- | Protochlamydia | 230 | ispD |
| | | | | erythritol 4- | amoebophila | | pc0327 |
| | | | | phosphate | (strain UWE25) | | |
| | | | | cytidylyltransferase | | | |
| | | | | (EC 2.7.7.60)(4- | | | |
| | | | | diphosphocytidy1-2C- | | | |
| | | | | methyl-D-erythritol | | | |
| | | | | synthase)(MEP | | | |
| | | | | cytidylyltransferase) | | | |
| | | | | (MCT) | | | |
| 63 | Fungi | Q2U5Q5 | Q2U5Q5_ASPOR | Putative | Aspergillus | 420 | A009011 |
| | | | | uncharacterized | oryzae (strain | | 3000049 |
| | | | | protein | ATCC 42149 / RIB | | |
| | | | | AO090113000049 | 40) | | |
| 64 | Fungi | Q6FTD7 | Q6FTD7_CANGA | Strain CBS138 | Candida glabrata | 1072 | CAGLOGO |
| | | | | chromosome G | (strain ATCC 2001 / | | 3311g |
| | | | | complete sequence | CBS 138 / JCM | | |
| | | | | | 3761 / NBRC | | |
| | | | | | 0622 / NRRL Y- | | |
| | | | | | 65)(Yeast) | | |
| | | | | | (Torulopsis | | |
| | | | | | glabrata) | | |
| 65 | Fungi | P09436 | SYIC_YEAST | Isoleucyl-tRNA | Saccharomyces | 1072 | ILS1 |
| | | | | synthetase, | cerevisiae (strain | | YBL076C |
| | | | | cytoplasmic (EC | ATCC 204508 / | | YBL0734 |
| | | | | 6.1.1.5)(Isoleucine-- | S288c)(Baker's | | |
| | | | | tRNA ligase)(IleRS) | yeast) | | |
| 66 | Plantae | A9ZN10 | A9ZN10_HEVBR | 2-C-methyl-D- | Hevea brasiliensis | 311 | HbCMS |
| | | | | erythritol 4- | (Para rubber | | |
| | | | | phosphate | tree)(Siphonia | | |
| | | | | cytidylyltransferase | brasiliensis) | | |
| | | | | (EC 2.7.7.60) | | | |
| 67 | Plantae | A9ZN09 | A9ZN09_HEVBR | 2-C-methyl-D- | Hevea brasiliensis | 311 | HbCMS |
| | | | | erythritol 4- | (Para rubber | | |
| | | | | phosphate | tree)(Siphonia | | |
| | | | | cytidylyltransferase | brasiliensis) | | |
| | | | | (EC 2.7.7.60) | | | |
| 157 | Plantae | | EZ222881 | 2-C-methyl-D- | Artemisia annua | 302 | |
| | | | (GenBank | erythritol 4- | | | |
| | | | mRNA | phosphate | | | |
| | | | polynucleo- | cytidylyltransferase | | | |
| | | | tide sequence) | | | | |
| 171 | Bacteria | | AAC75789 | 2-C-methyl-D- | E. coli | 236 | |
| | | | (GenBank | erythritol 4- | | | |
| | | | polynucleo- | phosphate | | | |
| | | | tide sequence) | cytidylyltransferase | | | |
| 182 | Algae | | KA659949 | 2-C-methyl-D- | Botrycoccus | 298 | |
| | | | (GenBank | erythritol 4- | braunii | | |
| | | | polynucleo- | phosphate | | | |
| | | | tide sequence) | cytidylyltransferase | | | |

4-diphosphocytidyl-2C-methyl-D-erythritol kinase
Sequence example (SEQ ID NO: 68, Arabidopsis thaliana):

| MHHHHHHASM DREAGLSRLT LFSPCKINVF LRITSKRDDG YHDLASLFHV ISLGDKIKFS | | | | | | 60 | |
|---|---|---|---|---|---|---|---|
| LSPSKSKDRL STNVAGVPLD ERNLIIKALN LYRKKTGTDN YFWIHLDKKV PTGAGLGGGS | | | | | | 120 | |
| SNAAIILWAA NQFSGCVATE KELQEWSGEI GSDIPFFFSH GAAYCTGRGE VVQDIPSPIP | | | | | | 180 | |
| FDIPMVLIKP QQACSTAEVY KRFQLDLSSK VDPLSLLEKI STSGISQDVC VNDLEPPAFE | | | | | | 240 | |
| VLPSLKRLKQ RVIAAGRGQY DAVFMSGSGS TIVGVGSPDP PQFVYDDEEY KDVFLSEASF | | | | | | 300 | |
| ITRPANEWYV EPVSGSTIGD QPEFSTSFDM S | | | | | | 331 | |
| SEQ ID | | | | | | | |
| NO: | Taxon | Entry | Entry name | Protein names | Organism | Length | Gene |
| 69 | Bacteria | Q6MAT6 | ISPE_PARUW | 4-diphosphocytidyl- | Protochlamydia | 288 | ispE |
| | | | | 2-C-methyl-D- | amoebophila | | pc1589 |
| | | | | erythritol kinase | (strain UWE25) | | |
| | | | | (CMK)(EC 2.7.1.148) | | | |
| | | | | (4-(cytidine-5′- | | | |
| | | | | diphospho)-2-C- | | | |
| | | | | methyl-D-erythritol | | | |
| | | | | kinase) | | | |
| 70 | Bacteria | F8L344 | F8L344_SIMNZ | 4-diphosphocytidyl- | Simkania | 294 | ispE |
| | | | | 2-C-methyl-D- | negevensis | | SNE_A18050 |
| | | | | erythritol kinase | (strain ATCC VR- | | |
| | | | | (CMK)(EC 2.7.1.148) | 1471 / Z) | | |
| | | | | (4-(cytidine-5′- | | | |
| | | | | diphospho)-2-C- | | | |
| | | | | methyl-D-erythritol | | | |
| | | | | kinase) | | | |
| 71 | Fungi | D8PTC7 | D8PTC7_SCHCM | Putative | Schizophyllum | 556 | SCHCODRAFT_ |
| | | | | uncharacterized | commune (strain | | 256250 |
| | | | | protein | H4-8 / FGSC | | |
| | | | | | 9210) (Split gill | | |
| | | | | | fungus) | | |
| 72 | Fungi | Q8SRR7 | Q8SRR7_ENCCU | MEVALONATE | Encephalitozoon | 303 | ECU060_490 |
| | | | | PYROPHOSPHATE | cuniculi (strain | | |
| | | | | DECARBOXYLASE | GB-M1) | | |
| | | | | | (Microsporidian | | |
| | | | | | parasite) | | |
| 73 | Plantae | A9ZN11 | A9ZN11_HEVBR | 4-(Cytidine 5′- | Hevea brasiliensis | 388 | HbCMK |
| | | | | diphospho)-2-C- | (Para rubber | | |
| | | | | methyl-D-erythritol | tree) (Siphonia | | |
| | | | | kinase (EC 2.7.1.148) | brasiliensis) | | |
| | | | | (4-diphosphocytidy1- | | | |
| | | | | 2C-methyl-D- | | | |
| | | | | erythritol kinase) | | | |
| 158 | Plantae | | EZ157809 | 4-diphosphocytidyl- | Artemisia annua | 396 | |
| | | | (GenBank | 2C-methyl-D- | | | |
| | | | mRNA | erythritol kinase | | | |
| | | | polynucleo- | | | | |
| | | | tide sequence) | | | | |
| 172 | Bacteria | | AAC74292 | 4-diphosphocytidyl- | E. coli | 283 | |
| | | | (GenBank | 2C-methyl-D- | | | |
| | | | polynucleo- | erythritol kinase | | | |
| | | | tide sequence) | | | | |
| 183 | Algae | | KA659950 | 4-diphosphocytidyl- | Botrycoccus | 357 | |
| | | | (GenBank | 2C-methyl-D- | braunii | | |
| | | | polynucleo- | erythritol kinase | | | |
| | | | tide | | | | |
| | | | sequence) | | | | |

2-C-methyl-D-erythritol 2,4-cyclodiphosphate synthase
Sequence example (SEQ ID NO: 74) (Arabidopsis thaliana):

| MATSSTQLLL SSSSLFHSQI TKKPFLLPAT KIGVWRPKKS LSLSCRPSAS VSAASSAVDV | | | | | | 60 | |
|---|---|---|---|---|---|---|---|
| NESVTSEKPT KTLPFRIGHG FDLHRLEPGY PLIIGGIVIP HDRGCEAHSD GDVLLHCVVD | | | | | | 120 | |
| AILGALGLPD IGQIFPDSDP KWKGAASSVF IKEAVRLMDE AGYEIGNLDA TLILQRPKIS | | | | | | 180 | |
| PHKETIRSNL SKLLGADPSV VNLKAKTHEK VDSLGENRSI AAHIVILLMK K | | | | | | 231 | |
| SEQ ID | | | | | | | |
| NO: | Taxon | Entry | Entry name | Protein names | Organism | Length | Gene |
| 75 | Bacteria | Q2NAE1 | ISPDF_ERYLH | Bifunctional enzyme | Erythrobacter | 386 | ispDF |
| | | | | IspD/IspF [Includes: | litoralis (strain | | ELI_06290 |
| | | | | 2-C-methyl-D- | HTCC2594) | | |
| | | | | erythritol 4- | | | |
| | | | | phosphate | | | |
| | | | | cytidylyltransferase | | | |
| | | | | (EC 2.7.7.60)(4- | | | |
| | | | | diphosphocytidy1-2C- | | | |
| | | | | methyl-D-erythritol | | | |
| | | | | synthase)(MEP | | | |
| | | | | cytidylyltransferase) | | | |
| | | | | (MCT); 2-C-methyl-D- | | | |
| | | | | erythritol 2,4- | | | |
| | | | | cyclodiphosphate | | | |
| | | | | synthase (MECDP- | | | |
| | | | | synthase)(MECPS) | | | |
| | | | | (EC 4.6.1.12)] | | | |
| 76 | Bacteria | B9E8S0 | B9E8S0_MACCJ | 2-C-methyl-D- | Macrococcus | 159 | ispF |
| | | | | erythritol 2,4- | caseolyticus | | MCCL_1881 |
| | | | | cyclodiphosphate | (strain JCSC5402) | | |
| | | | | synthase (MECDP- | | | |
| | | | | synthase)(MECPS) | | | |
| | | | | (EC 4.6.1.12) | | | |
| 77 | Fungi | Q2U5Q5 | Q2U5Q5_ASPOR | Putative | Aspergillus | 420 | AO090113000049 |
| | | | | uncharacterized | oryzae (strain | | |
| | | | | protein | ATCC 42149 / RIB | | |
| | | | | AO090113000049 | 40) | | |
| 78 | Fungi | Q0CZ74 | Q0CZ74_ASPTN | 2-C-methyl-D- | Aspergillus | 933 | ATEG_01010 |
| | | | | erythritol 2,4- | terreus (strain | | |
| | | | | cyclodiphosphate | NIH 2624 / FGSC | | |
| | | | | synthase | A1156) | | |
| 79 | Plantae | A9ZN13 | A9ZN13_HEVBR | 2-C-methyl-D- | Hevea brasiliensis | 241 | HbMCS |
| | | | | erythritol 2,4- | (Para rubber | | |
| | | | | cyclodiphosphate | tree)(Siphonia | | |
| | | | | synthase (EC | brasiliensis) | | |
| | | | | 4.6.1.12) | | | |
| 80 | Plantae | B6E1X5 | B6E1X5_HEVBR | 2-C-methyl-D- | Hevea brasiliensis | 238 | |
| | | | | erythritol 2,4- | (Para rubber | | |
| | | | | cyclodiphosphate | tree)(Siphonia | | |
| | | | | synthase (EC | brasiliensis) | | |
| | | | | 4.6.1.12) | | | |
| 81 | Plantae | A1KXW3 | A1KXW3_HEVBR | 2-C-methyl-D- | Hevea brasiliensis | 238 | ISPF |
| | | | | erythritol 2,4- | (Para rubber | | |
| | | | | cyclodiphosphate | tree)(Siphonia | | |
| | | | | synthase (EC | brasiliensis) | | |
| | | | | 4.6.1.12) | | | |
| 82 | Plantae | A9ZN12 | A9ZN12_HEVBR | 2-12-methyl-D- | Hevea brasiliensis | 237 | HbMCS |
| | | | | erythritol 2,4- | (Para rubber | | |
| | | | | cyclodiphosphate | tree)(Siphonia | | |
| | | | | synthase (EC | brasiliensis) | | |
| | | | | 4.6.1.12) | | | |
| 159 | Plantae | | EZ228118 | 2-12-methyl-D- | Artemisia annua | 226 | |
| | | | (GenBank | erythritol 2,4- | | | |
| | | | mRNA | cyclodiphosphate | | | |
| | | | polynucleo- | synthase | | | |
| | | | tide sequence) | | | | |
| 173 | Bacteria | | AAC75788 | 2-12-methyl-D- | E. coli | 159 | |
| | | | (GenBank | erythritol 2,4- | | | |
| | | | polynucleo- | cyclodiphosphate | | | |
| | | | tide sequence) | synthase | | | |
| 184 | Algae | | KA659951 | 2-12-methyl-D- | Botrycoccus | 239 | |
| | | | (GenBank | erythritol 2,4- | braunii | | |
| | | | polynucleo- | cyclodiphosphate | | | |
| | | | tide | synthase | | | |
| | | | sequence) | | | | |

4-hydroxy-3-methylbut-2-en-1-yl diphosphate synthase
Sequence example (SEQ ID NO: 83, Arabidopsis thaliana):

| MATGVLPAPV SGIKIPDSKV GFGKSMNLVR ICDVRSLRSA RRRVSVIRNS NQGSDLAELQ | | | | | | 60 | |
|---|---|---|---|---|---|---|---|
| PASEGSPLLV PRQKYCESLH KTVRRKTRTV MVGNVALGSE HPIRIQTMTT SDTKDITGTV | | | | | | 120 | |
| DEVMRIADKG ADIVRITVQG KKEADACFEI KDKLVQLNYN IPLVADIHFA PTVALRVAEC | | | | | | 180 | |
| FDKIRVNPGN FADRRAQFET IDYTEDEYQK ELQHIEQVFT PLVEKCKKYG RAMRIGINHG | | | | | | 240 | |
| SLSDRIMSYY GDSPRGMVES AFEFARICRK LDYHNFVFSM KASNPVIMVQ AYRLLVAEMY | | | | | | 300 | |
| VHGWDYPLHL GVTEAGEGED GRMKSAIGIG TLLQDGLGDT IRVSLTEPPE EEIDPCRRLA | | | | | | 360 | |
| NLGTKAAKLQ QGAPFEEKHR HYFDFQRRTG DLPVQKEGEE VDYRNVLHRD GSVLMSISLD | | | | | | 420 | |
| QLKAPELLYR SLATKLVVGM PFKDLATVDS ILLRELPPVD DQVARLALKR LIDVSMGVIA | | | | | | 480 | |
| PLSEQLTKPL PNAMVLVNLK ELSGGAYKLL PEGTRLVVSL RGDEPYEELE ILKNIDATMI | | | | | | 540 | |
| LHDVPFTEDK VSRVHAARRL FEFLSENSVN FPVIHHINFP TGIHRDELVI HAGTYAGGLL | | | | | | 600 | |
| VDGLGDGVML EAPDQDFDFL RNTSFNLLQG CRMRNIKIEY VSCPSCGRTL FDLQEISAEI | | | | | | 660 | |
| REKTSHLPGV SIAIMGCIVN GPGEMADADF GYVGGSPGKI DLYVGKTVVK RGIAMIEAID | | | | | | 720 | |
| ALIGLIKEHG RWVDPPVADE | | | | | | 740 | |
| SEQ ID | | | | | | | |
| NO: | Taxon | Entry | Entry name | Protein names | Organism | Length | Gene |
| 84 | Bacteria | F8L1N8 | F8L1N8_PARAV | 4-hydroxy-3- | Parachlamydia | 656 | ispG |
| | | | | methylbut-2-en-1-yl | acanthamoebae | | PUV_22380 |
| | | | | diphosphate | (strain UV7) | | |
| | | | | synthase (EC | | | |
| | | | | 1.17.7.1) | | | |
| 85 | Bacteria | Q6MD85 | ISPG_PARUW | 4-hydroxy-3- | Protochlamydia | 654 | ispG gcpE |
| | | | | methylbut-2-en-1-yl | amoebophila | | pc0740 |
| | | | | diphosphate | (strain UWE25) | | |
| | | | | synthase (EC | | | |
| | | | | 1.17.7.1)(1-hydroxy- | | | |
| | | | | 2-methy1-2-(E)- | | | |
| | | | | butenyl 4- | | | |
| | | | | diphosphate | | | |
| | | | | synthase) | | | |
| 86 | Bacteria | F8L7U6 | F8L7U6_SIMNZ | 4-hydroxy-3- | Simkania | 604 | ispG |
| | | | | methylbut-2-en-1-yl | negevensis | | SNE_A09 |
| | | | | diphosphate | (strain ATCC VR- | | 710 |
| | | | | synthase (EC | 1471 / Z) | | |
| | | | | 1.17.7.1) | | | |
| 87 | Fungi | F4SDS6 | F4SDS6_MELLP | Putative | Melampsora | 570 | MELLADRAFT_ |
| | | | | uncharacterized | larici-populina | | 70141 |
| | | | | protein | (strain 98AG31 / | | |
| | | | | | pathotype 3-4-7) | | |
| | | | | | (Poplar leaf rust | | |
| | | | | | fungus) | | |
| 88 | Fungi | Q6CV00 | Q6CV00_KLULA | KLLA0C01001p | Kluyveromyces | 429 | KLLA0C01001g |
| | | | | | lactis (strain ATCC | | |
| | | | | | 8585 / CBS 2359 / | | |
| | | | | | DSM 70799 / | | |
| | | | | | NBRC 1267 / | | |
| | | | | | NRRL Y-1140 / | | |
| | | | | | WM37)(Yeast) | | |
| | | | | | (Candida | | |
| | | | | | sphaerica) | | |
| 89 | Plantae | A9ZN14 | A9ZN14_HEVBR | 4-hydroxy-3- | Hevea brasiliensis | 740 | HbHDS |
| | | | | methylbut-2-en-1-yl | (Para rubber | | |
| | | | | diphosphate | tree)(Siphonia | | |
| | | | | synthase (EC | brasiliensis) | | |
| | | | | 1.17.4.3) | | | |
| 160 | Plantae | | EZ235247 | 4-hydroxy-3- | Artemisia annua | 742 | |
| | | | (GenBank | methylbut-2-en-1-yl | | | |
| | | | mRNA | diphosphate | | | |
| | | | polynucleo- | synthase | | | |
| | | | tide sequence) | | | | |
| 174 | Bacteria | | AAC75568 | 4-hydroxy-3- | E. coli | 372 | |
| | | | (GenBank | methylbut-2-en-1-yl | | | |
| | | | polynucleo- | diphosphate | | | |
| | | | tide sequence) | synthase | | | |
| 185 | Algae | | KA659952 | 4-hydroxy-3- | Botrycoccus | 737 | |
| | | | (Gen Bank | methylbut-2-en-1-yl | braunii | | |
| | | | polynucleo- | diphosphate | | | |
| | | | tide | synthase | | | |
| | | | sequence) | | | | |

4-hydroxy-3-methylbut-2-enyl diphosphate reductase
Sequence example (SEQ ID NO: 90, Arabidopsis thaliana):

| MAVALQFSRL CVRPDTFVRE NHLSGSGSLR RRKALSVRCS SGDENAPSPS VVMDSDFDAK | | | | | | 60 | |
|---|---|---|---|---|---|---|---|
| VFRKNLTRSD NYNRKGFGHK EETLKLMNRE YTSDILETLK TNGYTYSWGD VTVKLAKAYG | | | | | | 120 | |
| FCWGVERAVQ IAYEARKQFP EERLWITNEI IHNPTVNKRL EDMDVKIIPV EDSKKQFDVV | | | | | | 180 | |
| EKDDVVILPA FGAGVDEMYV LNDKKVQIVD TTCPWVTKVW NTVEKHKKGE YTSVIHGKYN | | | | | | 240 | |
| HEETIATASF AGKYIIVKNM KEANYVCDYI LGGQYDGSSS TKEEFMEKFK YAISKGFDPD | | | | | | 300 | |
| NDLVKVGIAN QTTMLKGETE EIGRLLETTM MRKYGVENVS GHFISFNTIC DATQERQDAI | | | | | | 360 | |
| YELVEEKIDL MLVVGGWNSS NTSHLQEISE ARGIPSYWID SEKRIGPGNK IAYKLHYGEL | | | | | | 420 | |
| VEKENFLPKG PITIGVTSGA STPDKVVEDA LVKVFDIKRE ELLQLA | | | | | | 466 | |
| SEQ ID | | | | | | | |
| NO: | Taxon | Entry | Entry name | Protein names | Organism | Length | Gene |
| 91 | Bacteria | B1WTZ2 | ISPH_CYAA5 | 4-hydroxy-3- | Cyanothece sp. | 402 | ispH |
| | | | | methylbut-2-enyl | (strain ATCC | | cce_1108 |
| | | | | diphosphate | 51142) | | |
| | | | | reductase (EC | | | |
| | | | | 1.17.1.2) | | | |
| 92 | Bacteria | D8FV73 | D8FV73_9CYAN | 4-hydroxy-3- | Oscillatoria sp. | 397 | ispH |
| | | | | methylbut-2-enyl | PCC 6506 | | OSCI_750007 |
| | | | | diphosphate | | | |
| | | | | reductase (EC | | | |
| | | | | 1.17.1.2) | | | |
| 93 | Bacteria | B0JVA7 | ISPH_MICAN | 4-hydroxy-3- | Microcystis | 402 | ispH |
| | | | | methylbut-2-enyl | aeruginosa (strain | | MAE_16190 |
| | | | | diphosphate | NIES-843) | | |
| | | | | reductase (EC | | | |
| | | | | 1.17.1.2) | | | |
| 94 | Fungi | Q5A2S3 | Q5A253_CANAL | Putative | Candida albicans | 1056 | GDH2 |
| | | | | uncharacterized | (strain SC5314 / | | Cao19.2192 |
| | | | | protein GDH2 | ATCC MYA-2876) | | |
| | | | | | (Yeast) | | |
| 95 | Fungi | Q10172 | PAN1_SCHPO | Actin cytoskeleton- | Schizosaccharomyces | 1794 | pan1 |
| | | | | regulatory complex | pombe | | SPAC25G10.09c |
| | | | | protein panl | (strain 972 / | | SPAC27F1.01c |
| | | | | | ATCC 24843) | | |
| | | | | | (Fission yeast) | | |
| 96 | Plantae | A9ZN15 | A9ZN15_HEVBR | 4-hydroxy-3- | Hevea brasiliensis | 462 | HbHDR |
| | | | | methylbut-2-enyl | (Para rubber | | |
| | | | | diphosphate | tree)(Siphonia | | |
| | | | | reductase (EC | brasiliensis) | | |
| | | | | 1.17.1.2) | | | |
| 97 | Plantae | BSAZS1 | B5AZS1_HEVBR | 4-hydroxy-3- | Hevea brasiliensis | 462 | |
| | | | | methylbut-2-enyl | (Para rubber | | |
| | | | | diphosphate | tree)(Siphonia | | |
| | | | | reductase | brasiliensis) | | |
| 161 | Plantae | | EZ205940 | 4-hydroxy-3- | Artemisia annua | 455 | |
| | | | (GenBank | methylbut-2-enyl | | | |
| | | | mRNA | diphosphate | | | |
| | | | polynucleo- | reductase | | | |
| | | | tide sequence) | | | | |
| 162 | Plantae | | EZ232255 | 4-hydroxy-3- | Artemisia annua | 454 | |
| | | | (GenBank | methylbut-2-enyl | | | |
| | | | mRNA | diphosphate | | | |
| | | | polynucleo- | reductase | | | |
| | | | tide sequence) | | | | |
| 163 | Plantae | | EZ245831 | 4-hydroxy-3- | Artemisia annua | 459 | |
| | | | (GenBank | methylbut-2-enyl | | | |
| | | | mRNA | diphosphate | | | |
| | | | polynucleo- | reductase | | | |
| | | | tide sequence) | | | | |
| 175 | Bacteria | | AAC73140 | 4-hydroxy-3- | E. coli | 316 | |
| | | | (GenBank | methylbut-2-enyl | | | |
| | | | polynucleo- | diphosphate | | | |
| | | | tide sequence) | reductase | | | |
| 186 | Algae | | KA659953 | 4-hydroxy-3- | Botrycoccus | 502 | |
| | | | (GenBank | methyl but-2-enyl | braunii | | |
| | | | polynucleo- | diphosphate | | | |
| | | | tide sequence) | reductase | | | |

TABLE 6
Exemplary IFF pathway sequences
Isopentenyl-diphosphate Delta-isomerase I
Sequence example (SEQ ID NO: 98, Artemisia annua):

| MSTASLFSFP SFHLRSLLPS LSSSSSSSSS RFAPPRLSPI RSPAPRTQLS VRAFSAVTMT | | | | | | 60 | |
|---|---|---|---|---|---|---|---|
| DSNDAGMDAV QRRLMFEDEC ILVDENDRVV GHDTKYNCHL MEKIEAENLL HRAFSVFLFN | | | | | | 120 | |
| SKYELLLQQR SKTKVTFPLV WTNTCCSHPL YRESELIEEN VLGVRNAAQR KLFDELGIVA | | | | | | 180 | |
| EDVPVDEFTP LGRMLYKAPS DGKWGEHEVD YLLFIVRDVK LQPNPDEVAE IKYVSREELK | | | | | | 240 | |
| ELVKKADAGD EAVKLSPWFR LVVDNFLMKW WDHVEKGTIT EAADMKTIHK L | | | | | | 291 | |
| SEQ ID | | | | | | | |
| NO | Taxon | Entry | Entry name | Protein names | Organism | Length | Gene |
| 99 | Plantae | A8DPG2 | A8DPG2_ARTAN | Isopenteyl | Artemisia annua | 284 | |
| | | | | diphosphate | (Sweet | | |
| | | | | isomerase | wormwood) | | |
| 100 | Plantae | A9ZN05 | A9ZN05_HEVBR | Isopentenyl- | Hevea brasiliensis | 234 | HblPI I |
| | | | | diphosphate Delta- | (Para rubber | | |
| | | | | isomerase (EC | tree) (Siphonia | | |
| | | | | 5.3.3.2) | brasiliensis) | | |
| 101 | Plantae | A9ZN04 | A9ZN04_HEVBR | Isopentenyl- | Hevea brasiliensis | 306 | HblPI II |
| | | | | diphosphate Delta- | (Para rubber | | |
| | | | | isomerase (EC | tree) (Siphonia | | |
| | | | | 5.3.3.2) | brasiliensis) | | |
| 190 | Plantae | | EZ203680 | Isopentenyl- | Artemisia annua | 281 | |
| | | | (GenBank | diphosphate Delta- | | | |
| | | | polynucleo- | isomerase | | | |
| | | | tide | | | | |
| | | | sequence) | | | | |
| 191 | Plantae | A8DPG2 | A8DPG2_ARTAN | Isopentenyl- | Artemisia annua | 284 | |
| | | | | diphosphate Delta- | | | |
| | | | | isomerase | | | |
| 192 | Bacteria | | AAC75927 | Isopentenyl- | E. coli | 182 | |
| | | | (GenBank | diphosphate Delta- | | | |
| | | | polynucleo- | isomerase | | | |
| | | | tide sequence) | | | | |

Isopentenyl-diphosphate Delta-isomerase II
Sequence example (SEQ ID NO: 102, Artemisia annua):

| MSASSLFNLP LIRLRSLALS SSFSSFRFAH RPLSSISPRK LPNFRAFSGT AMTDTKDAGM | | | | | | 60 | |
|---|---|---|---|---|---|---|---|
| DAVQRRLMFE DECILVDETD RVVGHDSKYN CHLMENIEAK NLLHRAFSVF LFNSKYELLL | | | | | | 120 | |
| QQRSNTKVTF PLVWTNTCCS HPLYRESELI QDNALGVRNA AQRKLLDELG IVAEDVPVDE | | | | | | 180 | |
| FTPLGRMLYK APSDGKWGEH ELDYLLFIVR DVKVQPNPDE VAEIKYVSRE ELKELVKKAD | | | | | | 240 | |
| AGEEGLKLSP WFRLVVDNFL MKWWDHVEKG TLVEAIDMKT IHKL | | | | | | 284 | |
| SEQ ID | | | | | | | |
| NO: | Taxon | Entry | Entry name | Protein names | Organism | Length | Gene |
| 103 | Plantae | A9ZN05 | A9ZN05_HEVBR | Isopentenyl- | Hevea brasiliensis | 234 | HblPI I |
| | | | | diphosphate Delta- | (Para rubber | | |
| | | | | isomerase (EC | tree)(Siphonia | | |
| | | | | 5.3.3.2) | brasiliensis) | | |
| 104 | Plantae | A8DPG2 | A8DPG2_ARTAN | Isopenteyl | Artemisia annua | 284 | |
| | | | | diphosphate | (Sweet | | |
| | | | | isomerase | wormwood) | | |
| 105 | Plantae | A9ZN04 | A9ZN04_HEVBR | Isopentenyl- | Hevea brasiliensis | 306 | HblPI II |
| | | | | diphosphate Delta- | (Para rubber | | |
| | | | | isomerase (EC | tree)(Siphonia | | |
| | | | | 5.3.3.2) | brasiliensis) | | |
| 106 | Plantae | Q9S7C4 | Q9S7C4_HEVBR | Isopentenyl | Hevea brasiliensis | 234 | IPI2 IPI1 |
| | | | | pyrophosphate | (Para rubber | | |
| | | | | isomerase (EC | tree)(Siphonia | | |
| | | | | 5.3.3.2) | brasiliensis) | | |
| 188 | Fungi | P15496 | IDI1_YEAST | Isopentenyl | S. cerevisiae | 288 | |
| | | | | pyrophosphate | | | |
| | | | | isomerase | | | |

Farnesyl diphosphate synthase
Sequence example (SEQ ID NO: 107, Artemisia annua):

| MASEKEIRRE RFLNVFPKLV EELNASLLAY GMPKEACDWY AHSLNYNTPG GKLNRGLSVV | | | | | | 60 | |
|---|---|---|---|---|---|---|---|
| DTYAILSNKT VEQLGQEEYE KVAILGWCIE LLQAYFLVAD DMMDKSITRR GQPCWYKVPE | | | | | | 120 | |
| VGEIAINDAF MLEAAIYKLL KSHFRNEKYY IDITELFHEV TFQTELGQLM DLITAPEDKV | | | | | | 180 | |
| DLSKFSLKKH SFIVTFKTAY YSFYLPVALA MYVAGITDEK DLKQARDVLI PLGEYFQIQD | | | | | | 240 | |
| DYLDCFGTPE QIGKIGTDIQ DNKCSWVINK ALELASAEQR KTLDENYGKK DSVAEAKCKK | | | | | | 300 | |
| IFNDLKIEQL YHEYEESIAK DLKAKISQVD ESRGFKADVL TAFLNKVYKR SK | | | | | | 352 | |
| SEQ ID | | | | | | | |
| NO | Taxon | Entry | Entry name | Protein names | Organism | Length | Gene |
| 108 | Plantae | Q8L7F4 | Q8L7F4_HEVBR | Farnesyl diphosphate | Hevea brasiliensis | 342 | FDP |
| | | | | synthase | (Para rubber | | |
| | | | | | tree)(Siphonia | | |
| | | | | | brasiliensis) | | |
| 109 | Plantae | A6N2H2 | A6N2H2_HEVBR | Farnesyl diphosphate | Hevea brasiliensis | 342 | |
| | | | | synthase isoform | (Para rubber | | |
| | | | | | tree)(Siphonia | | |
| | | | | | brasiliensis) | | |
| 110 | Plantae | P49350 | FPPS_ARTAN | Farnesyl | Artemisia annua | 343 | FPS1 |
| | | | | pyrophosphate | (Sweet | | |
| | | | | synthase(FPP | wormwood) | | |
| | | | | synthase)(FPS)(EC | | | |
| | | | | 2.5.1.10)((2E,6E)- | | | |
| | | | | farnesyl diphosphate | | | |
| | | | | synthase) | | | |
| | | | | (Dimethylallyltrans- | | | |
| | | | | transferase)(EC | | | |
| | | | | 2.5.1.1)(Farnesyl | | | |
| | | | | diphosphate | | | |
| | | | | synthase) | | | |
| | | | | (Geranyltranstrans- | | | |
| | | | | ferase) | | | |
| 111 | Plantae | Q9ZPJ3 | Q9ZPJ3_ARTAN | Farnesyl diphosphate | Artemisia annua | 343 | |
| | | | | synthase | (Sweet | | |
| | | | | | wormwood) | | |
| 164 | Plantae | | EZ240258 | Farnesyl diphosphate | Artemisia annua | 343 | |
| | | | (GenBank | | synthase | | |
| | | | mRNA | | | | |
| | | | polynucleo- | | | | |
| | | | tide sequence) | | | | |
| 165 | Plantae | | EZ204727 | Farnesyl diphosphate | Artemisia annua | 342 | |
| | | | (GenBank | | synthase | | |
| | | | mRNA | | | | |
| | | | polynucleo- | | | | |
| | | | tide sequence) | | | | |
| 176 | Bacteria | P22939 | P22939_ECOLI | Farnesyl diphosphate | E. coli | 299 | |
| | | | | synthase | | | |
| 187 | Algae | | KA659963 | Farnesyl diphosphate | Botrycoccus | 362 | |
| | | | (GenBank | synthase | braunii | | |
| | | | polynucleo- | | | | |
| | | | tide sequence) | | | | |
| 189 | Fungi | P08524 | FPPS_YEAST | Farnesyl diphosphate | S. cerevisiae | 352 | |
| | | | synthase | | | | |

β-farnesene synthase
Sequence example (SEQ ID NO: 112, Artemisia annua)

| MDTLPISSVS FSSSTSPLVV DDKVSTKPDV IRHTMNFNAS IWGDQFLTYD EPEDLVMKKQ | | | | | | 60 | |
|---|---|---|---|---|---|---|---|
| LVEELKEEVK KELITIKGSN EPMQHVKLIE LIDAVQRLGI AYHFEEEIEE ALQHIHVTYG | | | | | | 120 | |
| EQWVDKENLQ SISLWFRLLR QQGFNVSSGV FKDFMDEKGK FKESLCNDAQ GILALYEAAF | | | | | | 180 | |
| MRVEDETILD NALEFTKVHL DIIAKDPSCD SSLRTQIHQA LKQPLRRRLA RIEALHYMPI | | | | | | 240 | |
| YQQETSHDEV LLKLAKLDFS VLQSMHKKEL SHICKWWKDL DLQNKLPYVR DRVVEGYFWI | | | | | | 300 | |
| LSIYYEPQHA RTRMFLMKTC MWLVVLDDTF DNYGTYEELE IFTQAVERWS ISCLDMLPEY | | | | | | 360 | |
| MKLIYQELVN LHVEMEESLE KEGKTYQIHY VKEMAKELVR NYLVEARWLK EGYMPTLEEY | | | | | | 420 | |
| MSVSMVTGTY GLMIARSYVG RGDIVTEDTF KWVSSYPPII KASCVIVRLM DDIVSHKEEQ | | | | | | 480 | |
| ERGHVASSIE CYSKESGASE EEACEYISRK VEDAWKVINR ESLRPTAVPF PLLMPAINLA | | | | | | 540 | |
| RMCEVLYSVN DGFTHAEGDM KSYMKSFFVH PMVV | | | | | | 574 | |
| SEQ ID | | | | | | | |
| NO: | Taxon | Entry | Entry name | Protein names | Organism | Length | Gene |
| 113 | Plantae | E7BTW6 | E7BTW6_ARTAN | E-beta-farnesene | Artemisia annua | 574 | betaFS1 |
| | | | | synthase 1 | (Sweet | | |
| | | | | | wormwood) | | |
| 114 | Plantae | Q9AXP5 | Q9AXP5_ARTAN | Sesquiterpene | Artemisia annua | 573 | |
| | | | | cyclase | (Sweet | | |
| | | | | | wormwood) | | |
| 115 | Plantae | Q8SA63 | CARS_ARTAN | Beta-caryophyllene | Artemisia annua | 548 | QHS1 |
| | | | | synthase(EC | (Sweet | | |
| | | | | 4.2.3.57) | wormwood) | | |
| 166 | Plantae | Q9FXY7 | Q9FXY7_ARTAN | Beta-farnesene | Artemisia annua | 574 | |
| | | | | synthase | | | |
| 167 | Plantae | O48935 | 048935_MENPI | Beta farnesene | Mentha piperita | 550 | |
| | | | | synthase | | | |

α-farnesene synthase
Sequence example (SEQ ID NO: 116, Picea abies):

| MDLAVEIAMD LAVDDVERRV GDYHSNLWDD DFIQSLSTPY GASSYRERAE RLVGEVKEMF | | | | | | 60 | |
|---|---|---|---|---|---|---|---|
| TSISIEDGEL TSDLLQRLWM VDNVERLGIS RHFENEIKAA IDYVYSYWSD KGIVRGRDSA | | | | | | 120 | |
| VPDLNSIALG FRTLRLHGYT VSSDVFKVFQ DRKGEFACSA IPTEGDIKGV LNLLRASYIA | | | | | | 180 | |
| FPGEKVMEKA QIFAAIYLKE ALQKIQVSSL SREIEYVLEY GWLTNFPRLE ARNYIDVFGE | | | | | | 240 | |
| EICPYFKKPC IMVDKLLELA KLEFNLFHSL QQTELKHVSR WWKDSGFSQL TFTRHRHVEF | | | | | | 300 | |
| YTLASCIAIE PKHSAFRLGF AKVCYLGIVL DDIYDTFGKM KELELFIAAI KRWDPSTTEC | | | | | | 360 | |
| LPEYMKGVYM AFYNCVNELA LQAEKTQGRD MLNYARKAWE ALFDAFLEEA KWISSGYLPT | | | | | | 420 | |
| FEEYLENGKV SFGYRAAILQ PILTLDIPLP LHILQQIDFP SRFNDLASSI LRLRGDICGY | | | | | | 480 | |
| QAERSRGEEA SSISCYMKDN PGSTEEDALS HINAMISDNI NELNWELLKP NSNVPISSKK | | | | | | 540 | |
| HAFDILRAFY HLYKYRDGFS IAKIETKNLV MRTVLEPVPM | | | | | | 580 | |
| SEQ ID | | | | | | | |
| NO: | Taxon | Entry | Entry name | Protein names | Organism | Length | Gene |
| 117 | Plantae | Q94G53 | Q94G53_ARTAN | (-)-beta-pinene | Artemisia annua | 582 | QH6 |
| | | | | synthase | (Sweet | | |
| | | | | | wormwood) | | |
| 168 | Plantae | Q675K8 | Q675K8_PICAB | Alpha-farnesene | Picea abies | 580 | |
| | | | | synthase | | | |

TABLE 7
Examples of plant-optimized polynucleotide sequences

| | |
|---|---|
| SEQ | |
| ID | |
| NO | Sequence |

MVA Pathway

| | | | |
|---|---|---|---|
| 118 | Acetyl-CoA | GGATCCGAGC TCATGTCGCA AAATGTTTAT ATCGTTTCAA CTGCCCGCAC TCCAATCGGT | 60 |
| | acetyltransferase | TCCTTTCAGG GTTCTCTGTC GTCCAAGACT GCTGTCGAAC TTGGTGCAGT TGCCCTTAAG | 120 |
| | | GGAGCTTTGG CGAAGGTGCC CGAGCTGGAC GCCTCCAAGG ACTTCGATGA AATCATTTTT | 180 |
| | | GGTAACGTGC TCAGCGCTAA TCTGGGACAA GCACCAGCAA GACAGGTCGC ACTTGCAGCT | 240 |
| | | GGATTGTCTA ACCACATCGT TGCATCAACG GTTAATAAGG TGTGCGCTAG CGCGATGAAG | 300 |
| | | GCTATCATTC TCGGCGCGCA ATCTATTAAG TGCGGGAACG CAGATGTGGT CGTTGCCGGC | 360 |
| | | GGGTGTGAGT CCATGACCAA TGCGCCATAC TATATGCCAG CAGCAAGAGC AGGAGCAAAG | 420 |
| | | TTCGGGCAGA CAGTTCTCGT GGACGGCGTC GAGAGAGATG GGCTCAACGA CGCTTACGAT | 480 |
| | | GGTCTGGCGA TGGGAGTGCA CGCAGAAAAG TGTGCCCGGG ACTGGGATAT CACCAGAGAG | 540 |
| | | CAGCAAGACA ACTTCGCTAT TGAAAGCTAT CAGAAGTCCC AAAAGAGCCA GAAGGAGGGC | 600 |
| | | AAGTTCGATA ACGAGATCGT CCCAGTTACG ATTAAGGGCT TTAGGGGGAA GCCGGACACG | 660 |
| | | CAAGTGACTA AGGATGAGGA ACCTGCACGC CTTCATGTCG AGAAGTTGAG GTCTGCCCGC | 720 |
| | | ACTGTGTTCC AGAAGGAAAA CGGCACCGTC ACAGCCGCTA ACGCCTCTCC GATCAATGAC | 780 |
| | | GGGGCGGCAG CCGTCATTCT CGTTTCAGAG AAGGTCCTGA AGGAAAAGAA TCTCAAGCCC | 840 |
| | | CTGGCCATCA TTAAGGGTTG GGGAGAGGCT GCACACCAGC CAGCTGATTT CACCTGGGCT | 900 |
| | | CCTTCGCTTG CGGTTCCCAA GGCATTGAAG CATGCCGGTA TCGAGGACAT TAACTCAGTC | 960 |
| | | GATTACTTCG AGTTCAACGA GGCCTTCTCC GTGGTCGGCC TCGTGAACAC CAAGATCCTT | 1020 |
| | | AAGTTGGACC CGTCAAAAGT GAATGTCTAT GGTGGAGCTG TGGCACTCGG ACATCCTCTG | 1080 |
| | | GGTTGCTCGG GAGCACGCGT TGTGGTCACA CTCCTGTCCA TCCTGCAGCA AGAGGGCGGG | 1140 |
| | | AAGATTGGCG TTGCGGCTAT TTGTAACGGT GGGGGGGGGG CGTCCTCCAT CGTGATTGAA | 1200 |
| | | AAGATTTGAG GTACCTCTAG AAAGCTT | 1227 |
| 119 | Acetyl-CoA | CTGGATCCGA GCTCATGGCT CCCGTCGCCG CCGCTGAAAT CAAGCCGAGA GATGTGTGTA | 60 |
| | acetyltransferase | TTGTTGGTGT GGCACGCACT CCTATGGGTG GGTTCCTGGG TCTCCTGTCC ACGCTGCCTG | 120 |
| | | CGACTAAGCT CGGCAGCATC GCAATTGAGG CAGCTCTGAA GAGGGCATCG GTGGACCCAT | 180 |
| | | CCCTCGTTCA GGAAGTGTTC TTTGGTAACG TCTTGTCCGC AAATCTCGGA CAGGCTCCTG | 240 |
| | | CAAGACAAGC AGCACTGGGT GCAGGAATCC CCAACAGCGT GGTCTGCACC ACAGTCAATA | 300 |
| | | AGGTTTGTGC GTCAGGCATG AAGGCAACCA TGCTGGCCGC TCAGTCGATC CAACTTGGGA | 360 |
| | | TTAACGATGT TGTGGTCGCC GGCGGGATGG AGTCTATGTC AAATGCTCCA AAGTACCTCG | 420 |
| | | CAGAAGCCCG GAAGGGTAGC AGATTGGGAC ACGACTCTCT CGTGGATGGC ATGCTGAAGG | 480 |
| | | ACGGGCTTTG GGATGTTTAT AACGACGTGG GCATGGGGTC TTGCGCCGAG ATTTGCGCTG | 540 |
| | | ACAATCACTC AATTACGCGG GAAGACCAGG ATAAGTTCGC CATCCATTCG TTTGAGAGAG | 600 |
| | | GTATTGCGGC ACAAGAATCC GGAGCTTTCG CGTGGGAGAT CGTGCCAGTC GAAGTTTCTG | 660 |
| | | GTGGACGGGG CAAGCCGCTG ACTATTGTGG ACAAGGATGA GGGTCTCGGA AAGTTCGATC | 720 |
| | | CTGTCAAGCT GAGGAAGCTC CGCCCCTCCT TTAAGGAAAA CGGCGGGACC GTGACAGCGG | 780 |
| | | GCAATGCATC CAGCATCAGC GACGGAGCAG CTGCACTCAT TCTGGTTTCT GGCGAGACCG | 840 |
| | | CGCTTAAGTT GGGGCTCCAG GTCATCGCAA AGATTAGGGG ATACGCAGAC GCAGCACAAG | 900 |
| | | CTCCAGAGTT GTTCACGACT GCACCAGCCC TCGCTATCCC GAAGACAATT GCGAACGCAG | 960 |
| | | GCCTGGATGC CTCCCAGGTG GACTACTATG AGATCAACGA AGCCTTTGCT GTTGTGGCGT | 1020 |
| | | TGGCAAATCA AAAGCTCTTG GGCCTTAACC CAGAGAAAGT GAATGTCCAC GGTGGAGCCG | 1080 |
| | | TCTCATTGGG ACATCCACTC GGATGCTCGG GGGCTAGGAT TCTGGTCACA CTCCTGGGTG | 1140 |
| | | TTCTTCGCAA GAAGAACGCT AAGTATGGAG TGGGAGGAGT CTGTAATGGT GGAGGAGGAG | 1200 |
| | | CAAGCGCTCT CGTCGTTGAG CTTTTGTGAG GTACCTCTAG AAAGCTT | 1247 |
| 120 | Acetyl-CoA | GGATCCGAGC TCATGAAGAA CTGTGTTATT GTGTCAGCGG TTAGGACTGC CATTGGGTCT | 60 |
| | acetyltransferase | TTCAACGGGT CACTCGCCAG CACCTCTGCC ATCGACTTGG GCGCGACAGT CATCAAGGCC | 120 |
| | | GCTATTGAGA GGGCAAAGAT CGACTCTCAG CACGTGGATG AAGTCATTAT GGGTAACGTT | 180 |
| | | CTTCAGGCGG GGTTGGGTCA AAATCCTGCA CGCCAGGCCC TCCTGAAGTC CGGTCTCGCA | 240 |
| | | GAGACCGTTT GCGGATTCAC AGTTAACAAG GTCTGTGGAT CTGGCCTTAA GTCAGTGGCC | 300 |
| | | TTGGCAGCAC AGGCTATCCA AGCAGGACAG GCACAAAGCA TTGTCGCCGG CGGGATGGAG | 360 |
| | | AATATGTCTC TCGCTCCCTA CCTTTTGGAT GCTAAGGCAA GGAGCGGCTA CCGCCTGGGG | 420 |
| | | GACGGTCAGG TCTATGATGT TATCCTCAGG GACGGACTGA TGTGCGCAAC CCACGGATAC | 480 |
| | | CATATGGGCA TCACAGCGGA GAACGTCGCA AAGGAATATG GCATTACGCG GGAGATGCAA | 540 |
| | | GATGAACTTG CTTTGCATTC ACAGAGAAAG GCAGCTGCAG CAATCGAGTC GGGAGCCTTT | 600 |
| | | ACTGCTGAAA TTGTTCCAGT GAACGTGGTC ACGCGGAAGA AGACTTTCGT GTTTTCGCAG | 660 |
| | | GACGAGTTCC CAAAGGCCAA TTCCACGGCA GAAGCCCTTG GCGCCTTGAG ACCGGCTTTT | 720 |
| | | GATAAGGCGG GGACCGTTAC AGCGGGGAAC GCATCCGGTA TCAATGACGG AGCCGCTGCG | 780 |
| | | CTTGTGATTA TGGAGGAAAG CGCAGCATTG GCTGCAGGAC TCACCCCACT GGCGCGGATC | 840 |
| | | AAGTCCTATG CAAGCGGTGG AGTGCCACCA GCACTCATGG GAATGGGACC TGTCCCCGCA | 900 |
| | | ACACAGAAGG CCCTCCAACT GGCTGGCCTT CAATTGGCGG ACATCGATCT GATTGAGGCC | 960 |
| | | AACGAGGCCT TCGCAGCCCA GTTTCTCGCT GTCGGCAAGA ATCTGGGGTT CGATTCTGAG | 1020 |
| | | AAGGTCAACG TTAATGGCGG GGCTATCGCG CTGGGACACC CAATTGGAGC ATCAGGCGCC | 1080 |
| | | CGCATCCTCG TCACCCTCCT GCATGCCATG CAAGCTCGCG ACAAGACGCT CGGTCTGGCC | 1140 |
| | | ACTCTCTGTA TTGGTGGAGG CCAGGGAATC GCTATGGTCA TCGAGAGGCT GAATTAAGGT | 1200 |
| | | ACCAAGCTT | 1209 |
| 121 | 3-hydroxy-3- | GGATCCGAGC TCATGGCAAA GAATGTTGGT ATCCTGGCTA TGGACATCTA TTTCCCGCCC | 60 |
| | methylglutaryl | ACCTACGTTC AGCAAGAAGC ACTGGAGGCA CACGACGGCG CTTCCAAGGG CAAGTACACA | 120 |
| | coenzyme A synthase | ATCGGCCTTG GGCAGGACTG CATGGCGTTC TGTACGGAGG TCGAAGATGT TATTTCTATG | 180 |
| | | TCACTCACCG CAGTGACATC GCTCCTGGAG AAGTACAACA TCGACCCTAA TCAGATTGGT | 240 |
| | | CGGCTGGAGG TTGGATCTGA AACAGTGATC GATAAGTCGA AGTCCATTAA GACGTTCCTT | 300 |
| | | ATGCAAATCT TCGAGAAGTT TGGTAACACA GACATTGAAG GAGTGGATAG CGCTAATGCA | 360 |
| | | TGCTACGGAG GGACGGCAGC TTTGTTCAAC TGTGTGAATT GGGTCGAGAG CAACTCTTGG | 420 |
| | | GACGGCCGCT ACGGGCTGGT GGTCTGCACT GATAGCGCAG TCTATGCAGA AGGACCTGCT | 480 |
| | | AGACCAACCG GTGGAGCAGC AGCCATCGCG ATGCTGATTG GCCCAGAGGC TCCGATCGCG | 540 |
| | | TTCGAATCCA AGTTTAGGGG GTCTCACATG TCACATGCAT ACGACTTCTA TAAGCCAAAC | 600 |
| | | CTGGCCTCGG AGTACCCGGT TGTGGACGGC AAGCTCTCCC AGACCTGTTA TCTCATGGCA | 660 |
| | | CTGGATAGCT GCTACAAGCA CTTTTGTGCC AAGTATGAGA AGCTCGAAGG GAAGCAGTTC | 720 |
| | | TCAATCTCGG ACGCCGAGTA CTTCGTGTTT CATTCTCCAT ATAACAAGCT GGTCCAAAAG | 780 |
| | | TCATTTGCTC GGCTTGTCTT CAACGATTTT GTTAGAAATG CGTCCAGCAT TGACGATGCT | 840 |
| | | GCGAAGGAGA AGCTCGCCCC TTTCTCGACC TTGTCCGGCG ACGAGTCTTA CCAGAATAGG | 900 |
| | | GATCTGGAAA AGGTCTCACA GCAAGTTGCT AAGCCCTTGT ATGACGCGAA GGTTCAGCCT | 960 |
| | | ACCACACTCA TCCCCAAGCA AGTGGGTAAC ATGTACACTG CTTCCCTCTA TGCAGCCTTC | 1020 |
| | | GCGAGCCTTT TGCACAATAA GCATACCGAG CTGGCCGGCA AGCGCGTGAT CCTGTTCAGC | 1080 |
| | | TACGGTTCTG GACTTACGGC TACTATGTTT TCCCTTAGAT TGCACGAGGG CCAGCATCCA | 1140 |
| | | TTCTCCTTGA GCAACATTGC AACTGTTATG AATGTGGCCG GGAAGCTCAA GACCAGGCAC | 1200 |
| | | GAGTTCCCAC CGGAAAAGTT TGCAGTCATC ATGAAGCTGA TGGAGCATCG CTACGGTGCC | 1260 |
| | | AAGGACTTTG TTACATCAAA GGATTGCTCG ATTTTGGCGC CGGGAACGTA CTATCTCACT | 1320 |
| | | GAGGTCGACA CCATGTACAG GCGCTTCTAT GCACAAAAGG CCGTGGGCGA TACGGTCGAA | 1380 |
| | | AACGGCCTCC TGGCTAATGG GCACTGAGGT ACCTCTAGAA AGCTT | 1425 |
| 122 | 3-hydroxy-3- | GGATCCGAGC TCATGAAGCT GTCCACGAAG CTGTGCTGGT GCGGTATCAA GGGTAGACTG | 60 |
| | methylglutaryl | CGCCCCCAAA AGCAACAACA ACTCCATAAC ACGAATCTCC AAATGACGGA GCTGAAGAAG | 120 |
| | coenzyme A synthase | CAGAAGACGG CCGAACAAAA GACTCGGCCT CAGAACGTGG GCATCAAGGG CATCCAAATC | 180 |
| | | TACATCCCCA CTCAGTGCGT GAATCAATCG GAGCTTGAAA AGTTCGACGG TGTCTCCCAG | 240 |
| | | GGAAAGTATA CCATCGGCCT CGGGCAGACA AACATGTCTT TTGTCAATGA CCGGGAGGAT | 300 |
| | | ATCTACTCCA TGAGCCTCAC GGTTCTGTCC AAGCTCATCA AGTCATACAA CATCGACACT | 360 |
| | | AATAAGATCG GTAGATTGGA AGTGGGAACC GAAACACTCA TCGATAAGTC TAAGTCAGTC | 420 |
| | | AAGAGCGTTT TGATGCAGCT CTTCGGCGAG AACACGGACG TCGAAGGGAT TGATACTCTC | 480 |
| | | AACGCGTGCT ACGGCGGGAC AAATGCATTG TTTAACTCTC TCAATTGGAT CGAGTCAAAT | 540 |
| | | GCGTGGGACG GTCGGGATGC AATTGTGGTC TGTGGAGACA TTGCTATCTA CGATAAGGGA | 600 |
| | | GCAGCTAGAC CTACCGGTGG AGCAGGTACA GTGGCAATGT GGATCGGACC AGACGCCCCG | 660 |
| | | ATTGTCTTCG ATTCCGTTAG GGCCAGCTAC ATGGAGCACG CTTACGACTT CTATAAGCCA | 720 |
| | | GATTTTACCA GCGAATACCC GTATGTCGAC GGCCATTTCT CTCTGACATG CTATGTGAAG | 780 |
| | | GCCCTTGATC AGGTCTACAA GTCGTATTCC AAGAAGGCTA TCTCGAAGGG ACTGGTTTCC | 840 |
| | | GACCCTGCAG GGAGCGATGC TCTGAACGTG CTTAAGTACT TCGACTATAA TGTGTTTCAC | 900 |
| | | GTCCCCACGT GTAAGCTCGT TACTAAGTCC TACGGCCGGC TCCTGTATAA CGACTTCAGA | 960 |
| | | GCCAATCCTC AATTGTTTCC CGAGGTCGAT GCCGAACTGG CTACCAGGGA CTACGATGAG | 1020 |
| | | TCACTGACCG ACAAGAACAT CGAAAAGACA TTCGTTAATG TGGCGAAGCC ATTTCATAAG | 1080 |
| | | GAGCGCGTTG CACAGAGCCT CATTGTGCCG ACGAACACTG GCAATATGTA CACAGCCAGC | 1140 |
| | | GTGTATGCGG CATTCGCTTC TCTTTTGAAC TACGTCGGCT CAGACGATTT GCAAGGCAAG | 1200 |
| | | CGCGTTGGGC TCTTTAGCTA CGGTTCTGGA CTGGCCGCTT CACTTTATTC GTGTAAGATC | 1260 |
| | | GTTGGCGACG TGCAGCACAT CATTAAGGAG TTGGATATCA CGAACAAGCT CGCGAAGAGG | 1320 |
| | | ATTACCGAGA CACCAAAGGA CTACGAAGCG GCAATCGAGC TGCGCGAAAA CGCACACCTT | 1380 |
| | | AAGAAGAATT TCAAGCCGCA AGGGTCGATC GAGCATCTGC AGTCCGGTGT GTACTATCTT | 1440 |
| | | ACCAACATTG ACGATAAGTT CAGGCGCTCC TACGATGTCA AGAAGTAAGG TACCAAGCTT | 1500 |
| 123 | 3-hydroxy-3- | GGATCCGAGC TCATGGATGT TAGGAGAAGA CCAACCAGCG GCAAGACGAT TCATTCCGTT | 60 |
| | methylglutaryl | AAGCCCAAGT CAGTGGAGGA CGAGTCGGCA CAGAAGCCCT CCGACGCCTT GCCACTCCCG | 120 |
| | coenzyme A reductase | CTGTACCTTA TCAACGCTCT CTGCTTCACA GTGTTCTTTT ACGTGGTCTA TTTTCTCCTG | 180 |
| | | TCGCGGTGGA GAGAAAAGAT TCGCACGTCC ACTCCCCTTC ACGTTGTGGC TTTGAGCGAG | 240 |
| | | ATCGCCGCTA TTGTCGCGTT CGTTGCATCT TTTATCTATC TTTTGGGGTT CTTTGGTATC | 300 |
| | | GATTTCGTCC AGTCATTGAT TCTCCGGCCA CCGACGGACA TGTGGGCCGT TGACGATGAC | 360 |
| | | GAGGAAGAGA CAGAAGAGGG CATTGTGCTC CGGGAGGATA CGAGAAAGCT GCCGTGCGGG | 420 |
| | | CAAGCCCTTG ACTGTTCATT GTCGGCGCCT CCCCTCTCTA GGGCAGTCGT TTCCAGCCCC | 480 |
| | | AAGGCCATGG ACCCAATCGT CCTGCCTAGC CCCAAGCCAA AGGTTTTCGA CGAAATTCCG | 540 |
| | | TTTCCTACCA CAACGACTAT CCCCATTCTC GGCGATGAGG ACGAAGAGAT CATTAAGTCG | 600 |
| | | GTGGTCGCGG GCACTATCCC ATCCTACAGC CTCGAATCCA AGCTGGGGGA TTGCAAGAGA | 660 |
| | | GCAGCAGCAA TCAGGAGAGA GGCACTCCAG AGGATTACCG GAAAGTCTCT GTCAGGCCTG | 720 |
| | | CCCCTTGAAG GGTTCGACTA CGAGAGCATC CTGGGCCAGT GCTGTGAGAT GCCAGTGGGG | 780 |
| | | TATGTCCAAA TCCCGGTGGG AATTGCCGGC CCTCTCCTGC TTGATGGCAA GGAATATAGC | 840 |
| | | GTGCCAATGG CCACCACAGA GGGTTGCCTG GTCGCTTCTA CCAACCGCGG CTGTAAGGCC | 900 |
| | | ATCCATCTTT CCGGAGGAGC TACGAGCGTC TTGCTCAGGG ATGGCATGAC TAGGGCCCCA | 960 |
| | | GTTGTGCGGT TCGGGACCGC AAAGAGAGCT GCACAGTTGA AGCTCTACCT GGAAGACCCT | 1020 |
| | | GCCAACTTTG AGACCCTCTC GACATCCTTC AATAAGTCTT CAAGGTTTGG TCGCCTTCAA | 1080 |
| | | TCCATCAAGT GCGCAATTGC CGGAAAGAAT CTCTATATGC GCTTCTGCTG TTCTACAGGG | 1140 |
| | | GACGCCATGG GTATGAACAT GGTGTCAAAG GGCGTTCAGA ACGTGCTCAA TTTCCTGCAA | 1200 |
| | | AATGATTTTC CGGATATGGA CGTGATCGGG CTGTCTGGTA ACTTCTGCTC AGACAAGAAG | 1260 |
| | | CCTGCAGCCG TCAATTGGAT TGAAGGAAGG GGCAAGAGCG TCGTTTGTGA GGCGATCATT | 1320 |
| | | AAGGGCGACG TGGTCAAGAA GGTGCTCAAG ACTAACGTGG AAGCACTTGT CGAGTTGAAC | 1380 |
| | | ATGCTCAAGA ATCTGACCGG TTCAGCTATG GCGGGAGCAC TGGGTGGATT CAACGCCCAC | 1440 |
| | | GCTTCGAATA TCGTCACCGC CATCTACATT GCTACAGGCC AGGACCCAGC GCAAAACGTC | 1500 |
| | | GAATCGTCCA ATTGCATCAC AATGATGGAG GCAGTTAATG ATGGTCAGGA CCTCCATGTT | 1560 |
| | | TCGGTGACGA TGCCATCCAT TGAGGTCGGC ACGGTTGGCG GGGGTACTCA GCTTGCGAGC | 1620 |
| | | CAATCTGCAT GTTTGAACCT GCTTGGAGTG AAGGGAGCAT CCAAGGAGAC CCCAGGTGCA | 1680 |
| | | AATAGCAGAG TCCTTGCCTC TATCGTTGCT GGATCAGTGT TGGCTGCGGA GCTTTCATTG | 1740 |
| | | ATGTCGGCCA TTGCAGCCGG CCAGCTGGTT AACTCCCACA TGAAGTACAA CAGGGCTAAT | 1800 |
| | | AAGGAGGCTG CGGTCAGCAA GCCTAGCTCT TGAGGTACCT CTAGAAAGCT T | 1851 |
| 124 | 3-hydroxy-3- | GGATCCGAGC TCATGGCTGC CGATCAACTG GTGAAGACCG AGGTTACTAA GAAGTCGTTT | 60 |
| | methylglutaryl | ACTGCCCCTG TCCAAAAGGC GTCCACTCCC GTGCTGACCA ACAAGACCGT TATCTCGGGT | 120 |
| | coenzyme A reductase | TCCAAGGTGA AGTCCCTCTC CAGCGCCCAG TCTTCATCGT CCGGACCATC CTCCTCCTCC | 180 |
| | | GAGGAAGACG ATTCGCGGGA CATCGAGTCC CTGGATAAGA AGATTAGACC TCTCGAGGAA | 240 |
| | | CTGGAAGCCC TCCTGTCCAG CGGCAACACA AAGCAACTCA AGAATAAGGA GGTTGCCGCT | 300 |
| | | CTCGTGATCC ACGGCAAGCT CCCCTTGTAC GCTCTTGAAA AGAAGTTGGG AGACACCACA | 360 |
| | | AGGGCGGTTG CAGTGAGGCG CAAGGCGCTT TCGATTTTGG CCGAGGCTCC GGTGCTCGCA | 420 |
| | | TCAGATAGGC TGCCTTATAA GAACTACGAC TATGATCGCG TGTTCGGCGC CTGCTGTGAG | 480 |
| | | AATGTCATCG GGTACATGCC ACTTCCGGTC GGTGTTATCG GACCCCTCGT GATCGACGGC | 540 |
| | | ACATCTTATC ATATCCCAAT GGCGACGACT GAGGGTTGCC TCGTCGCAAG CGCAATGAGA | 600 |
| | | GGCTGTAAGG CCATTAACGC TGGCGGGGGT GCAACCACAG TGCTGACTAA GGACGGTATG | 660 |
| | | ACCAGGGGAC CAGTGGTCCG CTTCCCTACG CTTAAGCGCT CTGGCGCCTG CAAGATTTGG | 720 |
| | | CTCGATTCAG AGGAAGGGCA GAACGCGATT AAGAAGGCAT TCAATAGCAC ATCTAGGTTT | 780 |
| | | GCGCGCCTCC AGCACATCCA AACGTGTCTG GCAGGTGACC TTTTGTTCAT GCGGTTTAGA | 840 |
| | | ACAACTACCG GCGATGCTAT GGGGATGAAT ATGATTTCAA AGGGCGTTGA GTACTCGCTC | 900 |
| | | AAGCAAATGG TGGAGGAATA TGGTTGGGAG GACATGGAAG TTGTGTCAGT GTCGGGAAAC | 960 |
| | | TACTGCACTG ATAAGCCCGC GGCAATCAAT TGGATTGAGG GAAGGGGGAA GTCCGTCGTT | 1020 |
| | | GCAGAAGCTA CCATCCCAGG CGACGTGGTC AGAAAGGTCC TGAAGTCTGA TGTCTCAGCC | 1080 |
| | | CTCGTTGAGC TGAACATTGC TAAGAATCTT GTCGGTAGCG CGATGGCAGG ATCTGTTGGA | 1140 |
| | | GGCTTCAACG CCCATGCCGC TAATCTGGTG ACAGCCGTCT TTCTCGCTCT GGGCCAGGAC | 1200 |
| | | CCTGCTCAAA ACGTGGAGTC TTCAAATTGC ATCACGCTCA TGAAGGAAGT CGACGGGGAT | 1260 |
| | | CTGCGGATTT CCGTCAGCAT GCCGAGCATC GAGGTTGGCA CAATTGGGGG TGGAACGGTT | 1320 |
| | | CTTGAACCTC AGGGGGCGAT GTTGGATCTC CTGGGCGTCA GAGGACCACA CGCAACAGCT | 1380 |
| | | CCAGGCACGA ACGCGCGGCA ACTCGCAAGA ATCGTGGCAT GCGCAGTCCT GGCAGGAGAG | 1440 |
| | | CTTTCCTTGT GTGCGGCACT TGCCGCTGGG CATTTGGTGC AGAGCCACAT GACTCATAAC | 1500 |
| | | AGGAAGCCTG CCGAGCCCAC TAAGCCAAAC AATCTTGACG CTACCGATAT CAATCGCTTG | 1560 |
| | | AAGGACGGCT CCGTCACCTG CATTAAGAGC TAAGGTACCA AGCTT | 1605 |
| 125 | Mevalonate kinase | GGATCCGAGC TCATGGAAGT CAAGGCAAGG GCTCCGGGCA AGATTATTCT CAGCGGGGAA | 60 |
| | | CACGCAGTCG TTCACGGGTC TACAGCGGTG GCGGCATCGA TCAACCTGTA CACGTATGTC | 120 |
| | | ACTCTTTCGT TCGCCACCGC TGAGAATGAC GATTCTCTTA AGTTGCAGCT CAAGGACCTG | 180 |
| | | GCGCTTGAAT TTTCATGGCC AATCGGAAGG ATTCGCGAGG CCTTGTCCAA CCTCGGCGCT | 240 |
| | | CCGTCCAGCT CTACGAGGAC TTCTTGCTCC ATGGAGTCTA TCAAGACAAT TTCAGCCCTG | 300 |
| | | GTGGAGGAAG AGAATATCCC GGAGGCCAAG ATTGCTCTCA CCTCAGGGGT CTCGGCGTTC | 360 |
| | | TTGTGGCTCT ACACAAGCAT CCAAGGTTTT AAGCCTGCAA CCGTGGTCGT TACAAGCGAT | 420 |
| | | CTGCCCCTTG GCTCTGGGCT GGGTTCATCG GCCGCTTTCT GTGTCGCCCT TTCCGCGGCA | 480 |
| | | CTCCTGGCTT TTTCGGACTC CGTTAACGTG GATACCAAGC ACCTGGGGTG GTCGATCTTC | 540 |
| | | GGTGAATCCG ACTTGGAGCT TTTGAATAAG TGGGCCCTCG AAGGCGAGAA GATCATTCAT | 600 |
| | | GGAAAGCCTT CAGGCATTGA TAACACGGTG TCGGCTTATG GAAATATGAT CAAGTTCAAG | 660 |
| | | TCTGGCAACC TCACTCGGAT TAAGTCAAAT ATGCCCCTGA AGATGCTTGT TACCAACACA | 720 |
| | | CGGGTGGGGA GAAATACGAA GGCGTTGGTC GCAGGTGTTA GCGAGAGGAC TCTCCGCCAC | 780 |
| | | CCAAACGCGA TGTCTTTCGT GTTTAATGCA GTCGACAGCA TCTCTAACGA GCTGGCCAAT | 840 |
| | | ATCATTCAGT CCCCAGCTCC GGACGATGTG AGCATTACGG AAAAGGAAGA GAAGTTGGAA | 900 |
| | | GAGCTGATGG AGATGAACCA GGGGCTCCTG CAATGCATGG GTGTCTCCCA TGCTAGCATC | 960 |
| | | GAGACCGTTC TGCGCACCAC ACTTAAGTAC AAGTTGGCAT CCAAGCTCAC AGGAGCAGGA | 1020 |
| | | GGAGGTGGAT GTGTTCTCAC GCTTTTGCCA ACTCTCCTGT CCGGCACCGT GGTCGATAAG | 1080 |
| | | GCGATTGCAG AACTGGAGTC CTGCGGCTTC CAATGTCTTA TCGCCGGAAT TGGCGGGAAC | 1140 |
| | | GGCGTGGAGT TCTGCTTTGG TGGCTCCTCC TGAGGTACCT CTAGAAAGCT T | 1191 |
| 126 | Mevalonate kinase | GGATCCGAGC TCATGTCTCT CCCATTTCTT ACTTCCGCCC CAGGCAAGGT CATTATTTTT | 60 |
| | | GGTGAACACT CAGCAGTCTA CAACAAGCCA GCAGTCGCAG CTTCGGTCTC CGCGCTGAGG | 120 |
| | | ACTTACCTCC TGATCTCGGA GTCCAGCGCC CCTGACACCA TCGAACTCGA CTTCCCCGAT | 180 |
| | | ATTTCTTTTA ACCACAAGTG GTCAATCAAC GACTTCAATG CAATTACTGA GGATCAGGTC | 240 |
| | | AATTCTCAAA AGCTGGCGAA GGCACAGCAA GCCACCGACG GCCTGTCCCA GGAGCTTGTT | 300 |
| | | AGCCTTCTCG ACCCACTCCT GGCTCAACTC AGCGAATCTT TCCACTACCA TGCCGCTTTC | 360 |
| | | TGCTTTTTGT ATATGTTTGT TTGCCTCTGT CCACATGCTA AGAACATCAA GTTCAGCTTG | 420 |
| | | AAGTCTACCC TCCCGATTGG CGCTGGGCTG GGTTCTTCAG CGTCAATCTC GGTGTCCTTG | 480 |
| | | GCCCTCGCTA TGGCGTATTT GGGCGGGCTC ATTGGGTCGA ACGACCTGGA GAAGCTCTCC | 540 |
| | | GAAAACGATA AGCACATCGT GAATCAGTGG GCCTTCATCG GCGAGAAGTG TATTCATGGA | 600 |
| | | ACACCTTCTG GCATTGACAA CGCAGTCGCC ACGTACGGAA ATGCTCTTTT GTTTGAGAAG | 660 |
| | | GATTCACACA ACGGCACAAT CAATACGAAC AATTTCAAGT TTCTCGACGA TTTCCCAGCG | 720 |
| | | ATCCCGATGA TTCTGACTTA TACCCGCATC CCACGCAGCA CAAAGGACCT GGTTGCACGG | 780 |
| | | GTGAGAGTCC TTGTTACGGA GAAGTTCCCT GAAGTGATGA AGCCCATTCT GGATGCAATG | 840 |
| | | GGAGAGTGCG CCTTGCAGGG CCTCGAAATC ATGACAAAGC TCTCCAAGTG TAAGGGTACA | 900 |
| | | GACGATGAGG CCGTCGAAAC GAACAATGAG TTGTACGAAC AACTCCTGGA GCTTATCCGG | 960 |
| | | ATTAACCACG GCCTTTTGGT GTCAATCGGG GTCTCGCATC CGGGTCTGGA ACTTATCAAG | 1020 |
| | | AATCTGAGCG ACGATCTTCG CATTGGGTCT ACTAAGCTCA CCGGTGCAGG TGGAGGAGGA | 1080 |
| | | TGCTCCCTCA CTCTCCTGAG GAGAGACATC ACCCAGGAGC AAATTGATTC CTTCAAGAAG | 1140 |
| | | AAGCTCCAGG ACGATTTCTC GTATGAGACA TTTGAAACGG ACCTCGGTGG AACGGGCTGC | 1200 |
| | | TGTCTTTTGT CCGCAAAGAA CTTGAATAAG GATCTCAAGA TTAAGAGCCT GGTTTTCCAG | 1260 |
| | | CTTTTTGAGA ACAAGACCAC AACGAAGCAG CAAATCGACG ATCTCCTGCT TCCAGGCAAC | 1320 |
| | | ACTAATCTCC CGTGGACCAG CTAAGGTACC AAGCTT | 1356 |
| 127 | Phosphomevalonate | GGATCCGAGC TCATGGCAGT CGTTGCGTCC GCTCCAGGGA AGGGTGTTAT GACAGGGGGC | 60 |
| | kinase | TATCTTATTC TTGAGAGACC AAATGCAGGT ATCGTGCTTT CCACGAACGC TAGGTTCTAC | 120 |
| | | GCGATCGTTA AGCCTATGTA TGACGAAATT AAGCCCGATT CTTGGGCATG GGCCTGGACC | 180 |
| | | GACGTGAAGC TCACATCACC ACAGCTGGCC AGGGAGTCGC TTTACAAGCT CTCCCTCAAG | 240 |
| | | AACCTCGCAC TGCAATGCGT CTCCAGCTCT GCCTCCCGCA ATCCGTTCGT TGAGCAGGCA | 300 |
| | | GTGCAATTTG CAGTCGCAGC TGCACACGCA ACCCTGGACA AGGATAAGAA CAATGTGCTT | 360 |
| | | AACAAGCTCC TGCTTCAGGG CTTGGACATC ACGATTCTGG GGACTTCCGA TTGCTATAGC | 420 |
| | | TGTCGCAATG AGATCGAAGC GTGCGGCCTT CCTTTGACGC CCGAATCACT CGCAGCCCTG | 480 |
| | | CCTTCGTTCT CATCGATTAC TTTTAACGTC GAGGAAGCTA ACGGGCAGAA TTGTAAGCCA | 540 |
| | | GAGGTTGCAA AGACCGGACT GGGGTCCAGC GCTGCAATGA CCACAGCTGT GGTCGCAGCC | 600 |
| | | TTGCTCCACC ATCTCGGCCT GGTGGACCTC TCTTCATCGT GCAAGGAGAA GAAGTTCAGC | 660 |
| | | GACCTTGATT TGGTGCACAT CATTGCACAG ACAGCCCATT GTATCGCACA AGGCAAGGTC | 720 |
| | | GGTTCTGGAT TCGATGTTTC CAGCGCCGTG TACGGATCTC ACAGGTATGT TCGCTTTTCA | 780 |
| | | CCAGAGGTGC TGTCTTCAGC TCAGGACGCG GGCAAGGGGA TTCCGCTGCA AGAAGTCATC | 840 |
| | | AGCAACATTC TCAAGGGCAA GTGGGATCAT GAGCGGACGA TGTTCTCCCT TCCACCGTTG | 900 |
| | | ATGAGCCTGC TTTTGGGCGA GCCAGGAACG GGAGGGTCGT CCACTCCATC CATGGTGGGC | 960 |
| | | GCCCTCAAGA AGTGGCAGAA GAGCGACACC CAGAAGTCTC AAGAGACATG GAGGAAGCTC | 1020 |
| | | TCTGAGGCAA ACTCAGCCCT CGAAACTCAG TTCAACATCC TCAGCAAGCT GGCTGAGGAA | 1080 |
| | | CACTGGGACG CGTACAAGTG CGTCATCGAT TCATGTTCGA CCAAGAACTC CGAGAAGTGG | 1140 |
| | | ATTGAACAGG CTACAGAGCC TTCCAGGGAA GCTGTTGTGA AGGCGCTCCT GGGCAGCCGC | 1200 |
| | | AACGCAATGC TGCAGATCCG GAATTATATG AGACAAATGG GAGAGGCTGC AGGGGTGCCA | 1260 |
| | | ATTGAGCCGG AATCCCAGAC CCGGCTTTTG GACACGACTA TGAACATGGA TGGAGTCCTC | 1320 |
| | | CTGGCAGGCG TTCCGGGAGC AGGTGGATTC GACGCTGTCT TTGCGGTTAC GCTCGGCGAC | 1380 |
| | | AGCGGAACTA ACGTCGCTAA GGCCTGGTCC TCCCTCAACG TGTTGGCCCT TTTGGTCCGG | 1440 |
| | | GAGGACCCTA ATGGTGTTCT CCTGGAATCG GGAGATCCCA GAACAAAGGA GATCACCACA | 1500 |
| | | GCAGTGTCCG CCGTCCATAT TTGAGGTACC TCTAGAAAGC TT | 1542 |
| 128 | Phosphomevalonate | GGATCCGAGC TCATGTCGGA ACTCAGAGCA TTTTCGGCAC CGGGGAAGGC ACTGTTGGCA | 60 |
| | kinase | GGTGGTTATC TTGTTTTGGA CCCTAAGTAT GAAGCATTTG TGGTCGGACT TAGCGCAAGA | 120 |
| | | ATGCACGCAG TCGCTCATCC TTACGGGTCG TTGCAGGAGT CCGACAAGTT CGAAGTTAGA | 180 |
| | | GTGAAGAGCA AGCAGTTCAA GGATGGCGAG TGGCTGTATC ACATCTCTCC AAAGACAGGA | 240 |
| | | TTCATCCCGG TGAGCATTGG CGGGTCTAAG AACCCTTTTA TCGAGAAGGT CATCGCCAAC | 300 |
| | | GTCTTCTCAT ACTTTAAGCC CAATATGGAC GATTATTGCA ACAGGAATCT CTTCGTTATC | 360 |
| | | GACATCTTCT CCGACGATGC TTACCACTCA CAGGAGGATT CGGTGACCGA ACATCGGGGC | 420 |
| | | AATAGGCGCC TTTCTTTCCA CTCACATAGA ATCGAGGAAG TCCCAAAGAC TGGCTTGGGG | 480 |
| | | TCCAGCGCTG GGTTGGTCAC CGTTCTCACC ACAGCGCTGG CATCCTTCTT TGTGAGCGAC | 540 |
| | | CTCGAGAACA ATGTGGATAA GTACAGGGAG GTCATCCACA ACCTGTCTCA GGTGGCGCAT | 600 |
| | | TGTCAGGCAC AAGGCAAGAT CGGTTCGGGA TTCGACGTCG CAGCTGCAGC ATACGGCTCC | 660 |
| | | ATTCGCTATC GGAGATTTCC ACCGGCCCTT ATCAGCAACT TGCCAGACAT TGGCTCTGCC | 720 |
| | | ACATACGGGT CAAAGCTCGC TCACCTGGTC AACGAGGAAG ATTGGAATAT CACAATTAAG | 780 |
| | | TCGAATCATC TTCCGTCCGG CCTTACGTTG TGGATGGGTG ACATCAAGAA CGGCTCCGAG | 840 |
| | | ACGGTGAAGC TCGTCCAGAA GGTTAAGAAT TGGTACGACA GCCACATGCC AGAGTCTCTC | 900 |
| | | AAGATATACA CTGAACTGGA TCATGCGAAC TCCAGGTTCA TGGACGGTCT TAGCAAGTTG | 960 |
| | | GATCGCCTCC ACGAGACCCA TGACGATTAC TCAGACCAGA TTTTCGAGTC GCTCGAACGG | 1020 |
| | | AATGATTGCA CCTGTCAAAA GTATCCGGAG ATTACAGAAG TTAGGGACGC CGTGGCTACG | 1080 |
| | | ATCAGGCGCT CTTTCCGCAA GATTACTAAG GAGTCAGGCG CAGATATCGA ACCTCCCGTC | 1140 |
| | | CAGACCTCCC TCCTGGACGA TTGCCAAACG CTGAAGGGCG TTCTGACTTG TCTTATTCCT | 1200 |
| | | GGGGCGGGTG GATACGACGC GATCGCAGTT ATTGCAAAGC AGGACGTGGA TCTCCGGGCC | 1260 |
| | | CAAACCGCTG ACGATAAGAG ATTCTCCAAG GTCCAGTGGC TGGACGTTAC ACAAGCCGAT | 1320 |
| | | TGGGGCGTGC GCAAGGAGAA GGACCCCGAA ACGTATCTCG ATAAGTAAGG TACCAAGCTT | 1380 |
| 129 | Mevalonate | GGATCCGAGC TCATGGCAGA ATCATGGGTC ATTATGGTCA CCGCACAAAC TCCTACAAAC | 60 |
| | pyrophosphate | ATTGCTGTCA TCAAGTATTG GGGAAAGAGG GACGAGAAGT TGATTCTCCC TGTGAACGAC | 120 |
| | decarboxylase | AGCATCTCTG TGACCCTCGA CCCAGTCCAC CTCTGCACCA CAACGACTGT CGCGGTTTCA | 180 |
| | | CCATCGTTCG CACAGGATCG GATGTGGCTG AACGGCAAGG AGATTTCCCT TAGCGGCGGG | 240 |
| | | CGCTACCAGA ATTGCCTTCG CGAAATCAGG GCACGCGCCT GTGACGTTGA GGATAAGGAA | 300 |
| | | AGAGGGATTA AGATCAGCAA GAAGGACTGG GAGAAGCTCC ACGTGCATAT TGCTTCTTAT | 360 |
| | | AACAATTTCC CAACAGCAGC TGGTTTGGCC TCCAGCGCAG CAGGATTCGC TTGCCTCGTG | 420 |
| | | TTTGCTCTGG CGAAGCTCAT GAACGCTAAG GAGGATCATA GCGAATTGTC TGCAATCGCA | 480 |
| | | AGACAGGGCT CTGGGTCAGC ATGTAGATCC CTGTTCGGTG GATTTGTGAA GTGGAAGATG | 540 |
| | | GGCAAGGTCG AGGACGGGTC GGATTCCCTG GCAGTTCAGG TGGTCGACGA AAAGCACTGG | 600 |
| | | GACGATCTTG TGATCATTAT CGCCGTTGTG TCTTCAAGGC AAAAGGAGAC GTCGTCCACC | 660 |
| | | ACCGGTATGC GCGAGACGGT CGAAACTTCC CTCCTGCTTC AGCATAGGGC AAAGGAGATT | 720 |
| | | GTTCCTAAGC GCATCGTGCA GATGGAGGAA TCGATTAAGA ACAGGAATTT CGCTTCCTTT | 780 |
| | | GCGCACCTGA CTTGCGCGGA CTCTAACCAG TTCCATGCAG TCTGCATGGA TACGTGTCCA | 840 |
| | | CCGATCTTTT ACATGAACGA CACTTCCCAC CGGATTATCA GCTGTGTTGA GAAGTGGAAT | 900 |
| | | AGAAGCGTCG GCACCCCACA AGTTGCGTAT ACATTCGATG CAGGACCGAA CGCCGTCCTG | 960 |
| | | ATCGCTCATA ATCGCAAGGC CGCTGCGCAG TTGCTCCAAA AGCTGCTTTT CTACTTTCCT | 1020 |
| | | CCCAACTCTG ACACCGAGCT GAACTCCTAC GTGCTTGGCG ACAAGAGCAT TCTCAAGGAT | 1080 |
| | | GCCGGGATCG AGGACTTGAA GGATGTCGAA GCTCTCCCAC CACCTCCAGA GATTAAGGAC | 1140 |
| | | GCACCAAGAT ACAAGGGCGA TGTCTCATAT TTCATCTGCA CCCGGCCAGG TAGAGGACCG | 1200 |
| | | GTTTTGCTCT CAGACGAGTC GCAGGCCCTG CTTTCGCCTG AAACAGGCCT CCCCAAGTGA | 1260 |
| | | GGTACCTCTA GAAAGCTT | 1278 |
| 130 | Mevalonate | GGATCCGAGC TCATGACTGT CTACACCGCC AGCGTTACCG CACCTGTGAA CATTGCCACG | 60 |
| | pyrophosphate | TTGAAGTATT GGGGGAAGAG AGATACGAAG TTGAACCTGC CAACGAACTC CAGCATCAGC | 120 |
| | decarboxylase | GTCACTCTCT CTCAGGACGA TCTGCGCACG CTTACTTCCG CAGCTACCGC ACCTGAGTTC | 180 |
| | | GAAAGAGATA CACTCTGGCT GAATGGTGAA CCCCACTCCA TTGACAACGA ACGCACCCAG | 240 |
| | | AATTGCTTGA GGGATCTCCG CCAACTGCGG AAGGAGATGG AATCAAAGGA CGCTTCGCTT | 300 |
| | | CCTACTTTGT CTCAGTGGAA GCTGCATATC GTGTCAGAGA ACAATTTCCC CACCGCGGCA | 360 |
| | | GGTCTTGCGT CTTCAGCCGC TGGATTTGCG GCATTGGTCA GCGCCATTGC TAAGCTCTAC | 420 |
| | | CAGCTGCCGC AATCCACCAG CGAGATCAGC AGAATTGCGA GGAAGGGTTC TGGATCAGCA | 480 |
| | | TGCCGGTCGC TTTTCGGCGG GTATGTCGCC TGGGAGATGG GCAAGGCTGA AGACGGGCAC | 540 |
| | | GATTCCATGG CCGTTCAGAT CGCTGACTCG TCCGATTGGC CTCAGATGAA GGCCTGCGTT | 600 |
| | | CTGGTGGTCT CTGACATTAA GAAGGATGTG TCCTCCACAC AGGGCATGCA ACTCACCGTC | 660 |
| | | GCCACAAGCG AGCTGTTCAA GGAGAGAATC GAACATGTTG TGCCCAAGCG CTTTGAGGTC | 720 |
| | | ATGCGGAAGG CTATTGTCGA AAAGGATTTC GCGACGTTTG CAAAGGAGAC TATGATGGAC | 780 |
| | | TCGAACTCCT TCCACGCGAC GTGCCTCGAT TCCTTCCCAC CGATCTTTTA CATGAACGAC | 840 |
| | | ACATCCAAGA GGATCATTAG CTGGTGTCAT ACGATCAATC AGTTCTACGG CGAGACCATT | 900 |
| | | GTTGCTTATA CATTTGATGC GGGGCCAAAC GCAGTGCTTT ACTATTTGGC CGAGAACGAG | 960 |
| | | TCCAAGCTCT TCGCTTTTAT CTATAAGTTG TTCGGTTCTG TTCCGGGATG GGACAAGAAG | 1020 |
| | | TTTACCACAG AGCAGCTCGA AGCGTTCAAC CACCAATTTG AGTCATCGAA TTTCACAGCA | 1080 |
| | | AGAGAGCTTG ACTTGGAACT CCAGAAGGAT GTCGCCAGGG TTATCCTGAC GCAAGTGGGC | 1140 |
| | | TCGGGGCCAC AAGAGACTAA CGAGTCCCTC ATTGACGCCA AGACCGGCCT GCCGAAGGAG | 1200 |
| | | TAAGGTACCA AGCTT | 1215 |

MEPPathway

| | | | |
|---|---|---|---|
| 131 | 1-deoxy-D-xylulose-5- | GGATCCGAGC TCATGGCGTT GACTACATTT TCGATTTCAC GGGGGGGTTT CGTTGGAGCC | 60 |
| | phosphate synthase | CTGCCGCAAG AAGGACACTT TGCACCTGCC GCTGCTGAGC TTTCGTTGCA CAAGCTGCAG | 120 |
| | with chloroplast | TCCCGGCCTC ATAAGGCAAG GAGACGGTCC AGCTCTTCAA TCAGCGCATC TCTCTCAACG | 180 |
| | targeting sequence | GAGCGGGAAG CCGCTGAGTA CCACTCTCAA AGACCACCGA CGCCTCTCCT GGACACTGTG | 240 |
| | | AACTATCCCA TCCATATGAA GAATCTCAGC CTGAAGGAGC TTCAGCAATT GGCGGACGAA | 300 |
| | | CTGCGCTCCG ATGTCATTTT CCACGTTAGC AAGACGGGCG GGCATCTTGG ATCGTCCTTG | 360 |
| | | GGAGTGGTCG AGCTGACGGT GGCACTGCAC TACGTCTTTA ACACTCCGCA GGACAAGATC | 420 |
| | | CTCTGGGATG TCGGACACCA ATCCTATCCT CATAAGATTC TGACTGGCAG AAGGGACAAG | 480 |
| | | ATGCCCACGA TGAGGCAGAC TAATGGTCTC TCCGGATTCA CCAAGCGCTC GGAGTCCGAA | 540 |
| | | TACGATTCGT TTGGAACAGG CCATAGCTCT ACCACAATCT CCGCAGCATT GGGAATGGCA | 600 |
| | | GTGGGTAGGG ACCTCAAGGG TGGAAAGAAC AATGTTGTGG CAGTCATTGG GGATGGTGCG | 660 |
| | | ATGACCGCAG GACAGGCCTA CGAGGCTATG AACAATGCCG GCTATCTGGA CAGCGATATG | 720 |
| | | ATCGTTATTC TTAACGACAA TAAGCAAGTG TCTCTGCCTA CCGCAACACT TGATGGACCA | 780 |
| | | GCACCTCCAG TGGGTGCGCT GTCATCGGCA CTCAGCAAGC TGCAGTCCAG CCGCCCTCTT | 840 |
| | | CGGGAGTTGA GAGAAGTGGC CAAGGGCGTC ACCAAGCAAA TCGGCGGGTC CGTTCACGAG | 900 |
| | | CTGGCCGCTA AGGTGGACGA ATACGCTCGG GGGATGATTA GCGGATCTGG CTCAACACTC | 960 |
| | | TTCGAGGAAC TTGGCTTGTA CTATATCGGA CCCGTGGATG GCCATAACAT TGACGATCTT | 1020 |
| | | ATCACGATTT TGAGAGAGGT GAAGTCCACT AAGACGACTG GCCCAGTCCT CATCCACGTC | 1080 |
| | | GTTACGGAGA AGGGGAGGGG TTACCCGTAT GCGGAACGCG CGGCAGACAA GTACCATGGG | 1140 |
| | | GTCGCGAAGT TCGATCCAGC AACTGGCAAG CAGTTTAAGA GCCCGGCAAA GACCTTGTCT | 1200 |
| | | TACACAAACT ATTTCGCCGA GGCTCTTATC GCGGAGGCAG AACAAGACAA TAGGGTGGTC | 1260 |
| | | GCTATTCACG CAGCTATGGG TGGAGGCACC GGCCTCAACT ATTTCCTGCG CCGGTTTCCA | 1320 |
| | | AATCGCTGCT TCGATGTCGG CATCGCCGAG CAGCATGCTG TTACATTTGC GGCAGGATTG | 1380 |
| | | GCCTGCGAAG GCCTCAAGCC GTTCTGTGCT ATCTACTCTT CATTTCTGCA GAGGGGCTAT | 1440 |
| | | GACCAAGTTG TGCACGACGT CGATCTCCAG AAGCTGCCTG TTCGGTTCGC GATGGACAGA | 1500 |
| | | GCAGGACTCG TCGGAGCTGA TGGTCCAACC CATTGCGGAG CCTTTGACGT TACATACATG | 1560 |
| | | GCTTGTCTTC CAAACATGGT CGTTATGGCC CCGTCCGATG AGGCTGAACT CTGCCACATG | 1620 |
| | | GTGGCAACCG CAGCTGCAAT CGACGATAGA CCAAGCTGTT TCCGCTACCC ACGCGGAAAC | 1680 |
| | | GGCATTGGGG TCCCTCTGCC ACCGAATTAT AAGGGCGTTC CCCTTGAGGT CGGCAAGGGA | 1740 |
| | | CGGGTGCTTT TGGAGGGTGA AAGAGTCGCG CTCCTGGGCT ACGGGTCTGC AGTTCAGTAT | 1800 |
| | | TGCCTGGCAG CCGCTTCACT TGTGGAGAGA CACGGACTGA AGGTGACGGT CGCCGACGCT | 1860 |
| | | AGATTCTGTA AGCCACTTGA TCAAACTTTG ATCAGAAGGC TCGCCTCGTC CCACGAGGTC | 1920 |
| | | CTTTTGACCG TTGAGGAAGG ATCAATTGGG GGTTTCGGCT CGCATGTGGC CCAGTTTATG | 1980 |
| | | GCTTTGGACG GGCTCCTGGA TGGCAAGCTC AAGTGGAGGC CTCTCGTCCT GCCCGACCGC | 2040 |
| | | TACATCGATC ACGGGTCACC AGCAGACCAG TTGGCAGAGG CAGGTCTCAC CCCGTCGCAT | 2100 |
| | | ATCGCGGCAA CAGTTTTCAA CGTGCTGGGA CAAGCAAGAG AAGCCCTTGC TATTATGACA | 2160 |
| | | GTGCCGAATG CTTGAGGTAC CTCTAGAAAG CTT | 2193 |
| 132 | 1-deoxy-D-xylulose-5- | GGATCCGAGC TCATGGCCCT CTCTGCGTGT TCGTTCCCTG CTCATGTTGA CAAGGCGACT | 60 |
| | phosphate synthase | ATCAGCGACC TCCAAAAGTA TGGTTATGTG CCCAGCCGCA GCCTCTGGAG AACGGACCTC | 120 |
| | | CTGGCCCAGA GCTTGGGAAG GCTCAACCAG GCTAAGTCTA AGAAGGGACC TGGAGGAATC | 180 |
| | | TGCGCTTCCC TGAGCGAGAG AGGCGAATAC CACTCACAGA GGCCACCGAC TCCTCTTTTG | 240 |
| | | GACACCACAA ACTATCCCAT CCATATGAAG AATCTTAGCA TTAAGGAGCT GAAGCAACTT | 300 |
| | | GCCGACGAAT TGCGCTCGGA TGTGATCTTC AACGTCTCCC GGACGGGTGG ACACTTGGGC | 360 |
| | | TCCTCCCTCG GAGTGGTCGA GCTGACTGTT GCGCTTCATT ACGTGTTCTC AGCACCTCGG | 420 |
| | | GACAAGATCC TTTGGGATGT GGGGCACCAG TCCTACCCCC ATAAGATCCT CACCGGTAGG | 480 |
| | | CGCGAGAAGA TGTATACGAT TCGCCAAACT AATGGCCTCT CTGGGTTCAC CAAGCGGTCT | 540 |
| | | GAGTCAGAAT ACGACTGCTT TGGAACAGGC CACTCTTCAA CGACTATCTC CGCAGGACTC | 600 |
| | | GGTATGGCAG TGGGAAGGGA CCTGAAGGGC AAGAAGAACA ACGTTGTGGC AGTCATTGGA | 660 |
| | | GATGGCGCGA TGACAGCAGG GCAGGCCTAC GAGGCTATGA ACAATGCCGG TTATCTTGAC | 720 |
| | | TCAGATATGA TCGTTATCTT GAACGACAAT AAGCAAGTGT CGCTCCCTAC CGCCACACTG | 780 |
| | | GATGGACCAA TCCCTCCAGT GGGCGCGCTG TCGTCCGCAT TGTCGAGACT CCAGTCCAAC | 840 |
| | | AGGCCTCTGC GCGAGCTTCG GGAAGTTGCA AAGGGCGTGA CCAAGCAAAT CGGAGGACCA | 900 |
| | | ATGCACGAGT GGGCAGCTAA GGTGGACGAA TACGCCCGCG GCATGATTTC GGGGTCCGGT | 960 |
| | | AGCACACTCT TCGAGGAACT TGGCTTGTAC TATATCGGGC CTGTCGATGG TCATAATATT | 1020 |
| | | GACGATTTGA TCGCTATTCT CAAGGAGGTG AAGTCCACGA AGACCACAGG CCCAGTCCTG | 1080 |
| | | ATCCACGTCG TTACTGAGAA GGGACGCGGC TACCCGTATG CGGAAAAGGC GGCAGACAAG | 1140 |
| | | TACCATGGCG TCACCAAGTT CGATCCCGCG ACAGGAAAGC AGTTTAAGGG CTCAGCAATC | 1200 |
| | | ACGCAATCGT ACACGACTTA TTTCGCCGAG GCTCTCATTG CGGAGGCAGA AGTCGACAAG | 1260 |
| | | GATATCGTTG CCATTCACGC AGCTATGGGT GGAGGCACGG GGCTCAACCT GTTCCTTCGG | 1320 |
| | | AGATTTCCAA CTCGCTGCTT CGACGTCGGC ATCGCCGAGC AGCATGCTGT TACCTTTGCG | 1380 |
| | | GCAGGGCTTG CCTGCGAAGG TTTGAAGCCG TTCTGTGCTA TCTACAGCTC TTTTATGCAG | 1440 |
| | | CGGGCGTATG ATCAAGTGGT CCACGACGTG GATTTGCAGA AGCTCCCAGT CCGCTTCGCG | 1500 |
| | | ATGGACAGAG CAGGTCTCGT GGGAGCAGAT GGACCAACCC ATTGCGGAGC ATTCGACGTC | 1560 |
| | | ACCTTCATGG CTTGTCTGCC AAATATGGTT GTGATGGCCC CGAGCGATGA GGCTGAACTT | 1620 |
| | | TTCCACATGG TGGCAACCGC AGCTGCAATC GACGATAGAC CATCTTGTTT TAGATACCCG | 1680 |
| | | AGGGGGAACG GTGTCGGAGT TCAGCTGCCA CCGGGGAATA AGGGTATTCC GCTCGAGGTC | 1740 |
| | | GGCAAGGGAC GCATCCTGAT TGAGGGCGAA CGGGTTGCGC TCCTGGGTTA TGGAACCGCA | 1800 |
| | | GTGCAGTCCT GCCTCGCAGC AGCTAGCCTG GTCGAGCCTC ACGGCCTTTT GATCACCGTT | 1860 |
| | | GCCGACGCTA GATTCTGTAA GCCCCTGGAT CACACACTTA TTAGGAGCTT GGCCAAGTCT | 1920 |
| | | CATGAGGTCC TCATCACAGT TGAGGAAGGG TCTATTGGGG GTTTCGGTTC ACACGTGGCC | 1980 |
| | | CACTTCCTCG CTCTCGACGG ACTCCTGGAT GGCAAGCTGA AGTGGAGACC TCTGGTTCTT | 2040 |
| | | CCCGACAGGT ACATCGATCA CGGATCTCCA TCAGTCCAGC TTATTGAGGC TGGATTGACG | 2100 |
| | | CCAAGCCATG TGGCAGCAAC TGTCCTGAAC ATCCTTGGCA ATAAGAGGGA AGCGCTGCAA | 2160 |
| | | ATTATGTCAT CGTGAGGTAC CTCTAGAAAG CTT | 2193 |
| 133 | 1-deoxy-D-xyulose-5- | GGATCCGAGC TCATGGCGTT GACTACATTT TCGATTTCAC GGGGGGGTTT CGTTGGAGCC | 60 |
| | phosphate synthase | CTGCCGCAAG AAGGACACTT TGCACCTGCC GCTGCTGAGC TTTCGTTGCA CAAGCTGCAG | 120 |
| | with chloroplast | TCCCGGCCTC ATAAGGCAAG GAGACGGTCC AGCTCTTCAA TCAGCGCGTC TCTGTCAGAG | 180 |
| | targeting sequence | AGAGGCGAAT ACCACAGCCA GAGGCCACCG ACACCTCTTT TGGACACGAC TAACTATCCC | 240 |
| | | ATCCATATGA AGAATCTTTC TATTAAGGAG CTGAAGCAAC TTGCCGACGA ACTCCGCTCC | 300 |
| | | GATGTGATCT TCAACGTCAG CCGGACCGGA GGACACTTGG GGTCCAGCCT CGGTGTGGTC | 360 |
| | | GAGCTGACAG TTGCGCTTCA TTACGTGTTC AGCGCACCTC GCGACAAGAT CCTGTGGGAT | 420 |
| | | GTCGGACACC AGTCTTACCC CCATAAGATC CTTACGGGCA GGCGCGAGAA GATGTATACC | 480 |
| | | ATTAGACAAA CAAATGGTCT CTCCGGATTC ACGAAGAGGT CGGAGTCCGA ATACGACTGC | 540 |
| | | TTTGGGACTG GTCACTCTTC AACCACAATC TCCGCAGGAC TCGGAATGGC AGTGGGAAGG | 600 |
| | | GACCTGAAGG GCAAGAAGAA CAATGTTGTG GCAGTCATTG GGGATGGTGC CATGACCGCT | 660 |
| | | GGACAGGCGT ACGAGGCCAT GAACAACGCC GGCTATCTTG ACTCGGATAT GATCGTTATT | 720 |
| | | TTGAACGACA ATAAGCAAGT GTCCCTCCCT ACGGCTACTC TGGATGGACC AATCCCTCCA | 780 |
| | | GTGGGTGCCC TGTCGTCCGC TTTGTCCCGC CTCCAGAGCA ACCGGCCACT GAGAGAGCTT | 840 |
| | | CGCGAAGTTG CAAAGGGCGT GACCAAGCAA ATCGGTGGAC CGATGCACGA GTGGGCCGCT | 900 |
| | | AAGGTGGACG AATACGCCCG GGGGATGATT AGCGGATCTG GCTCAACACT CTTCGAGGAA | 960 |
| | | CTTGGTTTGT ACTATATCGG ACCTGTCGAT GGCCATAATA TTGACGATTT GATCGCTATT | 1020 |
| | | CTCAAGGAGG TGAAGTCCAC CAAGACGACT GGCCCAGTCC TGATCCACGT CGTTACAGAG | 1080 |
| | | AAGGGGCGCG GTTACCCGTA TGCGGAAAAG GCGGCAGACA AGTACCATGG CGTCACGAAG | 1140 |
| | | TTCGATCCGG CGACTGGGAA GCAGTTTAAG GGTTCGGCAA TCACCCAATC CTACACCACA | 1200 |
| | | TATTTCGCCG AGGCTCTCAT TGCGGAGGCA GAAGTCGACA AGGATATCGT TGCCATTCAC | 1260 |
| | | GCAGCTATGG GAGGAGGCAC CGGCCTCAAC CTGTTCCTTC GGAGATTTCC TACAAGATGC | 1320 |
| | | TTCGACGTCG GCATCGCGGA GCAGCATGCA GTTACATTTG CGGCAGGACT TGCCTGCGAA | 1380 |
| | | GGCTTGAAGC CCTTCTGTGC TATCTACAGC TCTTTTATGC AGAGGGCGTA TGATCAAGTG | 1440 |
| | | GTCCACGACG TGGATTTGCA GAAGCTCCCA GTCCGCTTCG CCATGGACAG AGCTGGACTC | 1500 |
| | | GTGGGAGCAG ATGGTCCAAC GCATTGCGGA GCCTTCGACG TCACTTTTAT GGCTTGTCTC | 1560 |
| | | CCAAACATGG TTGTGATGGC CCCGTCAGAT GAGGCTGAAC TGTTCCACAT GGTGGCTACC | 1620 |
| | | GCAGCTGCAA TCGACGATAG ACCATCCTGT TTTCGCTACC CGAGAGGAAA CGGCGTCGGA | 1680 |
| | | GTTCAGCTGC CACCGGGAAA TAAGGGCATT CCGCTCGAGG TCGGCAAGGG ACGCATCCTG | 1740 |
| | | ATTGAGGGCG AACGGGTTGC GCTCCTGGGC TATGGGACGG CAGTGCAGAG CTGCCTCGCA | 1800 |
| | | GCAGCTTCTC TGGTCGAGCC TCATGGCCTT TTGATCACGG TTGCCGACGC TCGCTTCTGT | 1860 |
| | | AAGCCCCTGG ATCACACTCT TATTCGGTCT TTGGCCAAGT CACATGAGGT CCTCATCACT | 1920 |
| | | GTTGAGGAAG GATCAATTGG AGGCTTCGGC TCGCACGTGG CGCACTTCCT CGCACTCGAC | 1980 |
| | | GGGCTCCTGG ATGGCAAGCT CAAGTGGAGA CCTCTGGTTC TTCCCGACAG GTACATCGAT | 2040 |
| | | CACGGGTCGC CATCCGTGCA GCTTATTGAG GCTGGTTTGA CCCCGAGCCA TGTGGCGGCA | 2100 |
| | | ACAGTCCTGA ACATCCTTGG CAATAAGAGG GAAGCGCTGC AAATTATGTC ATCGTGAGGT | 2160 |
| | | ACCTCTAGAA AGCTT | 2175 |

IFF Pathway

| | | | |
|---|---|---|---|
| 134 | Isopentenyl- | GGATCCGAGC TCATGGGTGA CGCCCCCGAT ACTGGCATGG ACGCCGTGCA AAGGAGACTG | 60 |
| | diphosphate | ATGTTTGAAG ACGAGTGTAT TCTGGTTGAC GAAAATGATC GGGCGGTCGG TCACGCATCC | 120 |
| | Delta-isomerase | AAGTACAGCT GCCATCTGTG GGAGAATATC CTTAAGGGAA ACTCTTTGCA CAGGGCGTTC | 180 |
| | | TCAGTTTTCC TCTTTAATTC GAAGTATGAA CTCCTGCTTC AGCAACGCTC CGCAACGAAA | 240 |
| | | GTGACTTTTC CTCTTGTCTG GACCAACACA TGCTGTTCCC ATCCCTTGTA CAGGGAGAGC | 300 |
| | | GAACGCATCG ACGAGGATGC CCTTGGCGTG CGGAATGCCG CTCAGAGAAA GTTGCTCGAC | 360 |
| | | GAGCTGGGGA TTCCTGCCGA AGACGTTCCC GTGGATCAAT TCACGCCATT GGGCAGGATG | 420 |
| | | CTCTACAAGG CTCCGTCTGA TGGCAAGTGG GGGGAGCACG AACTCGACTA TCTGCTTTTT | 480 |
| | | ATCGTCCGGG ATGTCAACGT TAATCCAAAC CCGGACGAGG TTGCTGATAT TAAGTATGTG | 540 |
| | | AACAGAGACG AGCTGAAGGA ATTGCTCAAG AAGGCCGATG CTGGCGAGGA AGGACTGAAG | 600 |
| | | CTCTCCCCTT GGTTCCGCCT CGTGGTCGAC AATTTCCTGT TTAAGTGGTG GGAGCACGTG | 660 |
| | | GAAAAGGGGA CACTCAAGGA GGCGGCAGAT ATGAAGACCA TTCATAAGCT GACATGAGGT | 720 |
| | | ACCTCTAGAA AGCTT | 735 |
| 135 | Isopentenyl- | GGATCCGAGC TCATGACTGC CGACAACAAC TCTATGCCTC ACGGTGCGGT TTCGTCCTAT | 60 |
| | diphosphate | GCCAAGCTGG TTCAAAATCA AACGCCCGAA GACATCCTCG AGGAGTTCCC AGAGATCATT | 120 |
| | Delta-isomerase | CCGCTCCAGC AAAGGCCTAA TACGCGCTCC AGCGAGACTT CTAACGACGA GTCAGGCGAA | 180 |
| | | ACGTGCTTCA GCGGGCACGA TGAGGAACAG ATCAAGTTGA TGAACGAGAA TTGTATTGTC | 240 |
| | | CTCGACTGGG ACGATAATGC GATCGGCGCA GGGACTAAGA AGGTTTGCCA CCTGATGGAG | 300 |
| | | AACATCGAAA AGGGCCTCCT GCATCGGGCC TTCAGCGTGT TCATTTTTAA TGAGCAGGGG | 360 |
| | | GAACTTTTGC TCCAGCAAAG AGCTACCGAG AAGATCACAT TTCCTGATCT GTGGACCAAC | 420 |
| | | ACATGCTGTT CTCACCCCCT TTGTATTGAC GATGAGCTGG GTCTTAAGGG CAAGCTCGAC | 480 |
| | | GATAAGATCA AGGGCGCCAT TACCGCCGCT GTCCGGAAGC TGGACCATGA GCTTGGTATC | 540 |
| | | CCAGAGGATG AAACGAAGAC TAGGGGAAAG TTCCACTTTC TGAATCGCAT TCATTACATG | 600 |
| | | GCGCCTTCCA ACGAGCCCTG GGGCGAGCAC GAAATCGACT ACATCTTGTT CTATAAGATC | 660 |
| | | AATGCAAAGG AGAACCTCAC AGTTAACCCA AATGTGAACG AAGTCCGCGA TTTCAAGTGG | 720 |
| | | GTGTCGCCGA ATGACCTGAA GACCATGTTT GCTGATCCAT CCTACAAGTT CACACCGTGG | 780 |
| | | TTCAAGATCA TTTGCGAGAA CTATCTTTTC AACTGGTGGG AACAGTTGGA CGATCTCTCC | 840 |
| | | GAGGTTGAAA ACGACCGGCA AATTCATAGA ATGTTGTAAG GTACCAAGCT T | 891 |
| 136 | Farnesyl diphosphate | GGATCCGAGC TCATGGCACC GACAGTTATG GCATCATCCG CTACAGCCGT TGCTCCTTTC | 60 |
| | synthase with | CAGGGGTTGA AGTCCACCGC TACTCTTCCC GTTGCGAGGA GGTCCACCAC CTCCTTCGCG | 120 |
| | chloroplast | AAGGTGTCAA ACGGCGGGAG GATCAGGTGC ATGGCATCGG AGAAGGAAAT TAGGCGCGAG | 180 |
| | targeting sequence | CGCTTCCTGA ACGTCTTTCC TAAGCTGGTT GAGGAACTTA ATGCCTCGCT CCTGGCTTAC | 240 |
| | | GGCATGCCCA AGGAGGCCTG TGACTGGTAC GCTCACTCCC TCAACTATAA TACGCCAGGT | 300 |
| | | GGAAAGTTGA ACAGGGGGCT CAGCGTGGTC GATACGTACG CCATCCTGTC TAATAAGACT | 360 |
| | | GTCGAGCAGC TTGGTCAAGA GGAATATGAA AAGGTTGCTA TCTTGGGATG GTGCATTGAG | 420 |
| | | CTTTTGCAGG CGTACTTCCT GGTCGCAGAC GATATGATGG ACAAGTCCAT CACCCGGAGA | 480 |
| | | GGCCAACCAT GTTGGTATAA GGTTCCGGAA GTGGGGGAAA TCGCGATTAA CGACGCATTC | 540 |
| | | ATGCTGGAGG CCGCTATCTA CAAGCTCCTG AAGTCACACT TTCGCAACGA GAAGTACTAT | 600 |
| | | ATCGACATTA CGGAGCTGTT CCATGAAGTT ACGTTTCAGA CTGAGCTGGG CCAACTGATG | 660 |
| | | GATCTTATCA CTGCGCCCGA AGACAAGGTG GATCTGTCTA AGTTCTCACT TAAGAAGCAC | 720 |
| | | TCCTTCATTG TCACCTTTAA GACAGCCTAC TATAGCTTTT ACCTGCCTGT GGCGCTTGCA | 780 |
| | | ATGTATGTCG CCGGCATCAC AGACGAGAAG GATCTTAAGC AGGCTCGGGA CGTGTTGATC | 840 |
| | | CCGCTCGGCG AGTACTTCCA GATTCAAGAC GATTATCTCG ATTGCTTTGG AACCCCTGAG | 900 |
| | | CAGATCGGCA AGATTGGGAC AGACATCCAA GATAACAAGT GTTCTTGGGT TATTAATAAG | 960 |
| | | GCCCTTGAGT TGGCCTCAGC TGAACAGAGA AAGACCCTGG ACGAGAACTA CGGCAAGAAG | 1020 |
| | | GATAGCGTGG CGGAAGCAAA GTGCAAGAAG ATTTTCAACG ACTTGAAGAT TGAGCAGCTC | 1080 |
| | | TACCATGAAT ATGAGGAATC TATCGCCAAG GATCTCAAGG CTAAGATTTC GCAAGTCGAC | 1140 |
| | | GAGTCCCGGG GCTTCAAGGC GGATGTTTTG ACAGCATTTC TCAATAAGGT GTACAAGAGA | 1200 |
| | | TCCAAGTGAG GTACCTCTAG AAAGCTT | 1227 |
| 137 | Farnesyl diphosphate | GGATCCGAGC TCATGGCTGA TCTGAAGTCG ACGTTTTTGA AGGTGTATTC CGTTCTGAAG | 60 |
| | synthase | CAGGAGTTGC TGGAGGACCC CGCATTTGAG TGGACCCCTG ACTCCAGGCA GTGGGTCGAG | 120 |
| | | CGCATGCTCG ATTACAACGT TCCTGGCGGG AAGCTCAATC GGGGCCTGTC TGTGATTGAC | 180 |
| | | TCATATAAGC TCCTGAAGGA GGGGCAAGAA CTTACCGAGG AAGAGATTTT CCTCGCGTCC | 240 |
| | | GCATTGGGTT GGTGCATTGA GTGGTTGCAG GCCTACTTTC TCGTCCTGGA CGATATCATG | 300 |
| | | GACTCCAGCC ACACAAGGCG CGGCCAACCT TGTTGGTTCA GGGTGCCCAA GGTCGGACTG | 360 |
| | | ATCGCAGCTA ACGATGGGAT TCTTTTGCGG AATCACATCC CCCGCATCCT CAAGAAGCAT | 420 |
| | | TTTCGCGGCA AGGCTTACTA TGTTGACCTC CTGGATTTGT TCAACGAAGT GGAGTTTCAG | 480 |
| | | ACCGCGTCTG GTCAAATGAT CGACCTCATT ACCACACTGG AAGGAGAGAA GGATCTCTCG | 540 |
| | | AAGTACACCC TTTCCTTGCA CCGGAGAATC GTCCAGTACA AGACAGCATA CTATAGCTTC | 600 |
| | | TATCTGCCAG TTGCCTGCGC TCTTTTGATT GCCGGCGAGA ACCTCGACAA TCATATCGTG | 660 |
| | | GTCAAGGATA TTCTGGTGCA GATGGGTATC TACTTCCAGG TCCAAGACGA TTATCTCGAC | 720 |
| | | TGTTTTGGAG ATCCGGAGAC GATCGGCAAG ATCGGAACTG ACATCGAAGA TTTCAAGTGC | 780 |
| | | TCCTGGCTCG TTGTGAAGGC ACTCGAGCTG TGTAACGAGG AGCAGAAGAA GGTGCTGTAC | 840 |
| | | GAACACTATG GCAAGGCCGA CCCAGCAAGC GTCGCCAAGG TCAAGGTTCT TTACAACGAG | 900 |
| | | CTTAAGTTGC AAGGGGTTTT CACGGAATAC GAGAACGAGT CATATAAGAA GCTGGTCACT | 960 |
| | | AGCATCGAGG CTCATCCATC TAAGCCGGTT CAGGCTGTGC TTAAGTCGTT TTTGGCGAAG | 1020 |
| | | ATATACAAGA GGCAAAAGTG AGGTACCTCT AGAAAGCTT | 1059 |
| 138 | Farnesyl diphosphate | GGATCCGAGC TCATGGCACC AACCGTCATG GCATCGTCCG CAACCGCCGT CGCACCTTTC | 60 |
| | synthase with | CAGGGTCTGA AGTCAACAGC AACACTCCCA GTCGCAAGAA GGTCTACCAC ATCATTCGCA | 120 |
| | chloroplast | AAGGTGTCCA ACGGCGGGAG GATCAGGTGC ATGGCCGACC TTAAGTCCAC GTTCTTGAAG | 180 |
| | targeting sequence | GTGTACAGCG TCCTCAAGCA GGAGCTGCTC GAGGACCCAG CTTTTGAGTG GACTCCCGAT | 240 |
| | | TCACGGCAAT GGGTGGAAAG AATGCTGGAC TACAACGTCC CAGGTGGCAA GCTCAATCGC | 300 |
| | | GGTTTGTCCG TGATCGATTC CTACAAGCTC TTGAAGGAGG GACAGGAACT TACCGAGGAA | 360 |
| | | GAGATTTTCC TCGCGTCCGC ACTGGGCTGG TGCATTGAGT GGTTGCAGGC CTACTTTCTT | 420 |
| | | GTCTTGGACG ATATCATGGA CTCCAGCCAC ACAAGGCGCG GGCAACCATG TTGGTTCCGG | 480 |
| | | GTTCCGAAAG TGGGTCTCAT CGCCGCTAAC GATGGCATCC TCCTGAGGAA TCACATCCCG | 540 |
| | | CGCATTCTTA AGAAGCATTT TAGAGGCAAG GCATACTATG TCGACCTTTT GGATTTGTTC | 600 |
| | | AACGAAGTTG AGTTTCAGAC GGCCAGCGGC CAAATGATCG ACCTTATTAC GACTTTGGAA | 660 |
| | | GGGGAGAAGG ATCTTAGCAA GTACACGCTC TCTCTGCACC GGAGAATCGT GCAGTACAAG | 720 |
| | | ACTGCTTACT ATTCTTTCTA TCTGCCTGTC GCCTGCGCTC TCCTGATTGC GGGCGAGAAC | 780 |
| | | CTCGACAATC ATATCGTGGT CAAGGATATT CTGGTTCAGA TGGGCATCTA CTTCCAGGTG | 840 |
| | | CAAGACGATT ATCTGGACTG TTTTGGCGAC CCAGAGACCA TCGGCAAGAT TGGGACAGAC | 900 |
| | | ATCGAAGATT TCAAGTGCTC GTGGCTCGTT GTGAAGGCTC TTGAGTTGTG TAACGAGGAG | 960 |
| | | CAGAAGAAGG TTCTGTACGA GCACTATGGC AAGGCGGACC CAGCATCCGT CGCCAAGGTC | 1020 |
| | | AAGGTTCTCT ACAACGAGCT GAAGCTGCAA GGAGTGTTCA CCGAATACGA GAACGAGTCT | 1080 |
| | | TATAAGAAGC TGGTCACATC AATCGAGGCG CATCCATCGA AGCCGGTCCA GGCTGTTCTC | 1140 |
| | | AAGTCATTTC TGGCGAAGAT ATACAAGCGG CAAAAGTGAG GTACCTCTAG AAAGCTT | 1197 |
| 139 | Farnesyl diphosphate | GGATCCGAGC TCATGGCGTC AGAGAAGGAG ATTAGAAGGG AGAGGTTTTT GAATGTTTTC | 60 |
| | synthase | CCCAAGCTGG TTGAAGAGTT GAATGCGTCA CTGCTGGCAT ACGGTATGCC TAAGGAGGCG | 120 |
| | | TGCGACTGGT ACGCACACTC CCTGAACTAT AATACCCCCG GCGGGAAGTT GAACCGGGGA | 180 |
| | | CTCTCGGTGG TCGATACCTA CGCCATCCTG TCCAATAAGA CAGTTGAGCA GCTTGGCCAA | 240 |
| | | GAGGAATATG AAAAGGTGGC TATCTTGGGG TGGTGCATTG AGCTGCTGCA GGCCTACTTC | 300 |
| | | CTCGTTGCTG ACGATATGAT GGACAAGTCT ATCACAAGGC GCGGTCAACC ATGTTGGTAT | 360 |
| | | AAGGTTCCGG AAGTGGGAGA AATCGCCATT AACGACGCTT TCATGCTGGA GGCCGCTATC | 420 |
| | | TACAAGCTCT TGAAGAGCCA CTTTCGCAAC GAGAAGTACT ATATCGACAT TACCGAGCTG | 480 |
| | | TTCCATGAAG TCACCTTTCA GACAGAGCTT GGTCAATTGA TGGATCTCAT CACAGCCCCT | 540 |
| | | GAAGACAAGG TCGATCTGTC CAAGTTCAGC CTTAAGAAGC ACAGCTTCAT TGTTACGTTT | 600 |
| | | AAGACTGCGT ACTATTCTTT CTACCTGCCG GTCGCGCTTG CAATGTATGT TGCGGGCATC | 660 |
| | | ACGGACGAGA AGGATCTGAA GCAGGCAAGG GACGTGCTGA TCCCACTTGG CGAGTACTTC | 720 |
| | | CAGATTCAAG ACGATTATCT TGATTGCTTT GGGACGCCGG AGCAGATCGG CAAGATCGGA | 780 |
| | | ACTGACATCC AAGATAACAA GTGTTCATGG GTCATCAACA AGGCCCTCGA GCTGGCATCG | 840 |
| | | GCTGAACAGC GCAAGACGCT GGACGAGAAC TACGGCAAGA AGGATTCCGT CGCGGAAGCA | 900 |
| | | AAGTGCAAGA AGATTTTCAA CGACTTGAAG ATTGAGCAGC TCTACCATGA ATATGAGGAA | 960 |
| | | AGCATCGCGA AGGATCTCAA GGCAAAGATT TCTCAAGTCG ACGAGTCACG GGGGTTCAAG | 1020 |
| | | GCCGATGTGT TGACTGCTTT TCTCAACAAG GTCTACAAGA GATCCAAGTA AGGTACCAAG | 1080 |
| | | CTT | 1083 |
| 140 | β-farnesene synthase | GGATCCGAGC TCATGGCCCC TACGGTCATG GCGTCCTCAG CGACTGCGGT TGCACCCTTT | 60 |
| | with chloroplast | CAAGGTCTCA AGAGCACGGC GACACTCCCT GTGGCACGGA GATCGACCAC ATCCTTCGCC | 120 |
| | targeting sequence | AAGGTTTCCA ACGGCGGGAG AATCAGGTGC ATGGACACGC TGCCAATTTC CAGCGTCTCA | 180 |
| | | TTTTCTTCAT CGACTTCGCC TCTTGTGGTC GACGATAAGG TTTCGACGAA GCCCGACGTG | 240 |
| | | ATCAGGCACA CTATGAACTT CAATGCTTCA ATTTGGGGCG ATCAGTTTCT GACCTACGAC | 300 |
| | | GAGCCAGAGG ACCTCGTGAT GAAGAAGCAA CTCGTTGAGG AACTGAAGGA GGAAGTGAAG | 360 |
| | | AAGGAGCTGA TCACAATTAA GGGTAGCAAT GAGCCGATGC AGCACGTGAA GCTCATCGAG | 420 |
| | | TTGATTGACG CGGTCCAACG CTTGGGAATC GCATACCATT TCGAGGAAGA GATCGAAGAG | 480 |
| | | GCCCTTCAGC ACATTCATGT CACCTACGGC GAGCAGTGGG TTGATAAGGA AAACTTGCAA | 540 |
| | | TCAATTTCGC TCTGGTTCCG CCTCCTGCGG CAGCAAGGTT TTAATGTGTC CAGCGGAGTC | 600 |
| | | TTCAAGGACT TTATGGATGA GAAGGGCAAG TTCAAGGAAT CTCTCTGCAA CGACGCGCAG | 660 |
| | | GGAATCCTTG CATTGTACGA GGCCGCTTTC ATGCGGGTGG AGGACGAAAC CATTCTTGAT | 720 |
| | | AATGCGTTGG AGTTTACAAA GGTCCACTTG GATATCATTG CAAAGGACCC GTCATGTGAT | 780 |
| | | TCTTCACTCA GAACCCAGAT CCATCAAGCC CTCAAGCAGC CACTGAGGAG AAGACTTGCA | 840 |
| | | AGGATCGAGG CACTGCACTA CATGCCGATC TACCAGCAAG AGACATCCCA TGACGAAGTT | 900 |
| | | CTTTTGAAGC TCGCTAAGCT GGATTTCTCG GTGTTGCAGT CCATGCACAA GAAGGAGCTG | 960 |
| | | AGCCATATCT GCAAGTGGTG GAAGGACCTC GATCTGCAAA ACAAGCTGCC TTACGTGCGC | 1020 |
| | | GACCGGGTTG TGGAGGGCTA TTTCTGGATT CTCTCCATCT ACTATGAGCC CCAGCACGCG | 1080 |
| | | AGAACCAGGA TGTTTCTGAT GAAGACATGC ATGTGGCTTG TCGTTTTGGA CGATACGTTC | 1140 |
| | | GACAATTACG GTACTTATGA AGAGCTGGAG ATTTTCACCC AAGCAGTGGA ACGCTGGTCC | 1200 |
| | | ATTAGCTGTC TCGATATGCT GCCTGAGTAC ATGAAGCTCA TCTATCAGGA GCTTGTTAAC | 1260 |
| | | TTGCACGTGG AGATGGAGGA GAGCCTGGAG AAGGAAGGGA AGACGTACCA AATTCATTAT | 1320 |
| | | GTCAAGGAGA TGGCCAAGGA ACTGGTGAGA AATTACCTTG TCGAGGCTAG GTGGCTGAAG | 1380 |
| | | GAAGGCTACA TGCCCACCCT TGAAGAGTAT ATGTCTGTCT CAATGGTTAC GGGCACTTAC | 1440 |
| | | GGGCTCATGA TCGCGCGCTC TTATGTGGGT CGGGGAGACA TTGTCACCGA GGATACATTC | 1500 |
| | | AAGTGGGTCT CGTCCTACCC ACCGATCATT AAGGCGTCCT GCGTTATCGT GCGCCTGATG | 1560 |
| | | GACGATATTG TCAGCCACAA GGAAGAGCAG GAGCGGGGCC ATGTTGCAAG CTCTATCGAG | 1620 |
| | | TGCTACAGCA AGGAATCTGG GGCCTCCGAA GAGGAGGCCT GCGAGTATAT CTCTCGCAAG | 1680 |
| | | GTTGAAGACG CCTGGAAGGT CATCAACAGA GAGTCACTGA GGCCAACGGC TGTGCCTTTC | 1740 |
| | | CCCCTCCTGA TGCCGGCCAT CAACTTGGCT CGGATGTGTG AGGTCCTCTA CAGCGTTAAT | 1800 |
| | | GACGGCTTCA CTCACGCCGA GGGGGATATG AAGAGCTATA TGAAGTCTTT CTTTGTCCAT | 1860 |
| | | CCTATGGTGG TCTGAGGTAC CTCTAGAAAG CTT | 1893 |
| 141 | β-farnesene synthase | GGATCCGAGC TCATGGATAC CCTGCCTATT TCGTCCGTCT CGTTCTCCTC TTCTACGTCG | 60 |
| | | CCACTGGTCG TCGATGATAA GGTGTCTACA AAGCCTGATG TGATCCGCCA CACGATGAAC | 120 |
| | | TTCAATGCCT CTATCTGGGG CGACCAGTTT CTGACTTACG ACGAGCCTGA GGACCTCGTG | 180 |
| | | ATGAAGAAGC AACTCGTCGA GGAACTGAAG GAAGAAGTCA AGAAGGAGCT GATCACGATT | 240 |
| | | AAGGGCTCAA ACGAGCCCAT GCAGCACGTG AAGCTCATCG AGTTGATTGA CGCGGTGCAA | 300 |
| | | AGGCTGGGGA TCGCATACCA TTTCGAGGAA GAGATCGAAG AGGCTCTTCA GCACATTCAT | 360 |
| | | GTGACATACG GCGAGCAGTG GGTCGATAAG GAAAACTTGC AATCAATTTC GCTCTGGTTC | 420 |
| | | AGACTCCTGA GGCAGCAAGG CTTTAATGTC TCCAGCGGGG TTTTCAAGGA CTTTATGGAT | 480 |
| | | GAGAAGGGCA AGTTCAAGGA ATCGCTCTGC AACGACGCGC AGGGCATCCT CGCATTGTAC | 540 |
| | | GAGGCCGCTT TCATGCGCGT TGAGGACGAA ACCATTCTTG ATAATGCGTT GGAGTTTACA | 600 |
| | | AAGGTCCACT TGGATATCAT TGCAAAGGAC CCTTCTTGTG ATTCTTCACT CCGCACGCAG | 660 |
| | | ATCCATCAAG CCCTCAAGCA GCCTCTGAGG AGAAGACTTG CAAGAATCGA GGCACTGCAC | 720 |
| | | TACATGCCCA TCTACCAGCA AGAGACTTCC CATGACGAAG TCCTTTTGAA GCTCGCTAAG | 780 |
| | | CTGGATTTCT CTGTTTTGCA GTCAATGCAC AAGAAGGAGC TGAGCCATAT CTGCAAGTGG | 840 |
| | | TGGAAGGACC TCGATCTGCA AAACAAGTTG CCATACGTGA GAGACAGGGT GGTCGAGGGG | 900 |
| | | TATTTCTGGA TTCTCTCCAT CTACTATGAG CCGCAGCACG CGCGCACGCG GATGTTTCTG | 960 |
| | | ATGAAGACTT GCATGTGGCT TGTTGTGTTG GACGATACCT TCGACAATTA CGGCACATAT | 1020 |
| | | GAAGAGCTGG AGATTTTCAC CCAAGCAGTG GAAAGGTGGT CCATTAGCTG TCTCGATATG | 1080 |
| | | CTGCCAGAGT ACATGAAGCT CATCTATCAG GAGCTTGTGA ACTTGCACGT CGAGATGGAG | 1140 |
| | | GAGAGCCTGG AGAAGGAAGG AAAGACCTAC CAAATTCATT ATGTCAAGGA GATGGCCAAG | 1200 |
| | | GAACTGGTCC GCAATTACCT TGTTGAGGCT CGGTGGCTGA AGGAAGGCTA CATGCCGACA | 1260 |
| | | CTTGAAGAGT ATATGTCTGT TTCAATGGTG ACCGGTACAT ACGGACTCAT GATCGCCAGA | 1320 |
| | | TCCTATGTTG GCAGGGGGGA CATTGTGACG GAGGATACTT TCAAGTGGGT GTCGTCCTAC | 1380 |
| | | CCACCGATCA TTAAGGCGAG CTGCGTGATC GTCAGACTGA TGGACGATAT TGTGTCTCAC | 1440 |
| | | AAGGAAGAGC AGGAGAGGGG TCATGTCGCA AGCTCTATCG AGTGCTACTC GAAGGAATCC | 1500 |
| | | GGAGCCAGCG AAGAGGAGGC CTGCGAGTAT ATCTCAAGAA AGGTCGAAGA TGCCTGGAAG | 1560 |
| | | GTTATTAATA GAGAGTCGCT GAGACCAACC GCTGTGCCTT TCCCACTCCT GATGCCGGCC | 1620 |
| | | ATCAACTTGG CTCGGATGTG TGAGGTTCTC TACAGCGTGA ATGACGGTTT TACACACGCC | 1680 |
| | | GAGGGAGATA TGAAGTCGTA TATGAAGTCC TTCTTTGTCC ATCCAATGGT CGTTTAAGGT | 1740 |
| | | ACCAAGCTT | 1749 |
| 142 | α-farnesene synthase | GGATCCGAGC TCATGGACTT GGCGGTGGAG ATTGCTATGG ACCTGGCTGT TGACGATGTT | 60 |
| | | GAACGGCGGG TGGGGGACTA TCACTCGAAC CTGTGGGACG ACGATTTCAT TCAGTCGCTC | 120 |
| | | TCCACGCCAT ATGGCGCATC CAGCTACAGG GAGAGAGCAG AAAGACTGGT GGGAGAGGTC | 180 |
| | | AAGGAAATGT TCACCAGCAT CTCTATTGAG GACGGTGAAC TCACATCCGA CCTCCTGCAG | 240 |
| | | AGACTGTGGA TGGTTGACAA CGTGGAGCGG CTCGGAATCT CGAGACACTT CGAGAACGAG | 300 |
| | | ATCAAGGCCG CTATTGACTA CGTCTATTCA TACTGGTCGG ATAAGGGCAT TGTTCGGGGG | 360 |
| | | AGAGACTCTG CTGTGCCGGA TCTCAACTCA ATCGCGCTGG GCTTCCGGAC CCTCAGACTG | 420 |
| | | CATGGGTACA CAGTGTCTTC AGACGTCTTC AAGGTTTTTC AGGATAGGAA GGGCGAGTTC | 480 |
| | | GCCTGCTCAG CTATTCCAAC CGAAGGCGAC ATCAAGGGAG TTCTGAATCT TTTGCGCGCA | 540 |
| | | TCCTATATCG CCTTCCCGGG CGAGAAGGTC ATGGAGAAGG CTCAAACCTT TGCGGCAACA | 600 |
| | | TACCTTAAGG AGGCGTTGCA GAAGATTCAA GTGTCGTCCC TCAGCCGCGA GATCGAATAT | 660 |
| | | GTCCTTGAGT ACGGCTGGTT GACAAACTTC CCTAGGCTGG AGGCACGCAA TTATATTGAC | 720 |
| | | GTCTTCGGGG AGGAAATCTG CCCATACTTT AAGAAGCCGT GTATCATGGT TGATAAGCTC | 780 |
| | | CTGGAGCTGG CCAAGCTGGA GTTCAACCTC TTTCACAGCC TGCAGCAAAC CGAGCTGAAG | 840 |
| | | CATGTCTCTA GGTGGTGGAA GGACTCCGGC TTCAGCCAGC TTACGTTTAC TAGGCACCGC | 900 |
| | | CATGTGGAGT TCTACACACT CGCTTCTTGC ATCGCGATTG AGCCGAAGCA CTCAGCTTTC | 960 |
| | | CGGCTGGGTT TTGCGAAAGT GTGTTATCTT GGAATTGTCT TGGACGATAT CTACGACACG | 1020 |
| | | TTCGGCAAGA TGAAGGAGCT TGAATTGTTT ACTGCCGCTA TTAAGCGCTG GGACCCATCC | 1080 |
| | | ACCACAGAGT GCCTCCCGGA ATATATGAAG GGCGTCTATA TGGCCTTCTA CAACTGTGTT | 1140 |
| | | AACGAGCTGG CGCTGCAGGC AGAAAAGACG CAAGGGAGGG ACATGCTGAA CTACGCCCGC | 1200 |
| | | AAGGCTTGGG AGGCGCTCTT CGATGCATTT CTGGAGGAAG CCAAGTGGAT CAGCTCTGGC | 1260 |
| | | TATCTTCCTA CTTTCGAGGA ATACTTGGAG AACGGCAAGG TGTCCTTCGG ATACAGGGCG | 1320 |
| | | GCAACGCTCC AGCCTATTCT TACTTTGGAC ATCCCACTCC CGCTGCACAT CCTTCAGCAA | 1380 |
| | | ATTGACTTCC CCTCCCGCTT TAACGATTTG GCTTCATCGA TTCTTCGGTT GAGAGGCGAT | 1440 |
| | | ATCTGCGGGT ATCAAGCAGA GAGGTCGCGC GGCGAGGAAG CCTCCAGCAT CTCCTGTTAC | 1500 |
| | | ATGAAGGACA ATCCCGGATC GACCGAGGAA GATGCACTGT CCCATATCAA CGCCATGATT | 1560 |
| | | AGCGACAACA TCAATGAGCT TAATTGGGAA CTTTTGAAGC CTAACAGCAA TGTGCCCATT | 1620 |
| | | TCTTCAAAGA AGCACGCTTT CGACATCCTT CGGGCGTTTT ACCATTTGTA TAAGTACAGA | 1680 |
| | | GATGGCTTCT CTATCGCCAA GATTGAGACG AAGAACCTCG TGATGAGGAC TGTCCTGGAG | 1740 |
| | | CCTGTTCCCA TGTAAGGTAC CAAGCTT | 1767 |

[0130] Preferably, a plant selected to be transformed with such polynucleotides has endogenously a large reserve of carbon-rich energy-storage molecules, in the form of sucrose (such as sweet sorghum and sugar cane) or resin (such as Hevea species and guayule), which are readily available for diversion into the production of terpenoids, and in some embodiments, the production of β-farnesene.

[0131] In sorghum, for example and as in many other plants, terpenoid synthesis occurs through the cytosolic MVA pathway and the MEP pathway, the latter of which is localized to the plastidic compartment (Cheng et al., 2007). In some embodiments, increasing the expression of the MVA pathway polypeptides, and/or the MEP pathway polypeptides directs the already large carbon reserves destined in some resin-rich, stored carbon-rich, and stored sugar-rich plants, such as in sorghum, to stored sucrose into increased production of terpenoids, and in some embodiments, where IFF polypeptides are expressed, β-farnesene. In these embodiments, the sum total of carbon flux through photosynthesis into the formation of sucrose and downstream secondary metabolites remain unchanged, with alterations in carbon flux occurring only in pathways involved in secondary metabolites (e.g., terpenoids). As these fluxes can be difficult to quantify using standard metabolic labeling/flux analysis techniques, such diversion of carbon can be quantified through the terpenoid synthesis pathways by: (1) assaying the expression levels and activities of up-regulated enzymes in modified plants or plant cells, (2) determining the amounts of terpenoids and precursors (IPP, FPP), and (3) quantifying amounts, and species as desired, of the produced secondary compounds, including HMG-CoA, methylerythritol phosphate, GPP, FPP, β-farnesene, and any other sesquiterpenoid moieties through liquid chromatography/mass spectrometry (LC/MS). By fully defining and quantifying all of the intermediates involved in the pathways being engineered, this approach allows for determining the relative carbon flux in transgenic plant cells and plants, as well as identify any potential bottlenecks that could result in accumulation of “upstream” precursors. Near Infra-Red spectroscopy (NIR) models can be developed to allow high throughput screening of high terpenoid transgenics (Cornish, 2004).

[0132] In some embodiments, β-farnesene synthesis in the cytosol is engineered to be up-regulated. These embodiments take advantage of the fact that the enzymes encoding terpenoid synthesis up to farnesene pyrophosphate are already present and functional in this cellular compartment. In cytosolic terpenoid synthesis, pyruvate formed from the glycolysis of sucrose molecules is converted into Acetyl-CoA which is itself incorporated into 3-hydroxy-3-methylglutaryl-coenzyme A (HMG-CoA) by the enzyme 3-hydroxy-3-methylglutaryl-coenzyme A reductase (Bach et al., 1991; Enjuto et al., 1994). As 3-hydroxy-3-methylglutaryl-coenzyme A reductase catalyzes the rate-limiting step in terpenoid production in the cytosol, this gene is over-expressed to funnel carbon from photosynthate into terpenoid production. HMG-CoA involved in terpenoid synthesis is then processed through the MVA pathway and used to generate dimethylallyl pyrophosphate (DMAPP) and isopentenyl pyrophosphate (IPP), both 5-carbon isoprene monomers for terpenoid biosynthesis (Bach et al., 1991; Cheng et al., 2007; Enjuto et al., 1994). These monomers are assembled together in a series of head-to-tail condensation reactions to generate farnesyl pyrophosphate (FPP, C15), a reaction catalyzed by the enzyme farnesyl diphosphate synthase (FDPS). To specifically direct the increased partitioning of carbon resulting from elevation of HMG-CoA synthesis into production of C15 sesquiterpenoids, expression of FDPS is increased in some embodiments (Cunillera et al., 1996).

[0133] Simultaneously up-regulating the expression of the enzymes catalyzing FPP and β-farnesene synthesis results in a dramatically increased pool of cytosolic FPP available for conversion into 3-farnesene. This final reaction is catalyzed by the enzyme β-farnesene synthase, which in some embodiments, is also exogenously expressed. Many characterized sesquiterpene synthases exhibit some degree of promiscuity, i.e., they are able to accept multiple isoprenoid substrates and/or produce multiple products from FPP (Schnee et al., 2006) (Tholl, 2006). To ensure that β-farnesene is the predominant product produced by the modified plant cells and plants of the invention, a β-farnesene synthase gene can be introduced, or the endogenous β-farnesene synthase gene up-regulated. This gene has been demonstrated to function in both monocot (maize) and dicot (Arabidopsis) systems, and to produce primarily β-farnesene (as well as α-bergamotene, β-sesquiphellandrene, β-bisabolene, α-zingiberene, and sesquisabinene in lesser amounts) (Schnee et al., 2006). These sesquiterpenoid molecules exhibit hydrocarbon structures (and therefore energetic yields) almost identical to those of 3-farnesene.

[0134] In some embodiments, β-farnesene synthesis is up-regulated in the non-photosynthetic pro-plastids of stem cortical tissues. In previous studies, sugar cane pro-plastids have successfully produced and stored the secondary compound polyhydroxybutyric acid (a bioplastic) (Petrasovits, 2007), thus in some embodiments of the invention, β-farnesene can be stored in this cellular compartment. Plastidic IPP synthesis occurs via the MEP pathway (FIG. 1) (Cheng et al., 2007; Estevez et al., 2000). In this pathway, pyruvate from the glycolysis of sucrose in the cytosol is imported into the plastid and funneled through the MEP pathway to generate the IPP/DMAPP 5-carbon isoprene building blocks of polyterpenoid molecules. GPP synthase enzymes then use these precursors to make C-10 geranyl pyrophosphate. Unlike the cytosol, however, no FPP synthase enzyme is present in the plastid and, instead, two GPP molecules are linked together to form diterpene geranylgeranyl pyrophosphate (GGPP, C20). In some embodiments, to ensure that terpenoid accumulation remains confined to the plastid and limit putative toxic effects, all cytosol-expressed proteins (except 3-hydroxy-3-methylglutaryl-coenzyme A reductase) can be routed to this subcellular compartment by adding an N-terminal signal sequence targeting them to the chloroplast (Bohlmann, 1998; Van den Broeck, 1985; von Heijne, 1989; Wienk, 2000). Thus in some embodiments where the engineered plant cell or plant produces β-farnesene in the plastid, a similar strategy to engineering β-farnesene cytosolic synthesis, is used. In further embodiments, the 1-deoxy-D-xylulose-5-phosphate synthase (DXS), which is the rate limited step in the MEP pathway limiting the production of IPP, is expressed (in lieu of the 3-hydroxy-3-methylglutaryl-coenzyme A reductase involved in cytosolic terpenoid production) and targeted to the plastids (Estevez et al., 2000).

[0135] In species like sorghum that do not possess specialized resin storage cells, tissue localization of β-farnesene synthesis can be preferable in some embodiments to generate a high farnesene sorghum plant cell or plant. In some embodiments, the transgenes encoding the enzymes of β-farnesene synthesis are operably linked to a global promoter, such as the PEPC promoter. Under these conditions, β-farnesene accumulates in part in all tissues. In alternative embodiments, β-farnesene production is targeted to mature stem cells involved in actively recruiting carbon-rich photosynthate to maximize production and minimize possible toxic effects. To ensure that the targeted internode regions have enough sucrose or other carbon source available for substantial β-farnesene production, those plant cells and plants producing large stores of carbon, such as high-sucrose sorghum lines, are preferably used. In such embodiments, the β-farnesene synthesis genes can be operably linked to promoters involved in secondary cell wall synthesis (Bell-Lelong et al., 1997; Liang et al., 1989; Maury et al., 1999; Nair et al., 2002) (for example, promoters for sorghum cinnamate 4-hydroxylase, coumarate 3-hydroxylase, and caffeic acid O-methyl transferase). At 30-40% of the stem internode mass, these cells represent a considerable storage volume. In lemon grass, an analogous system, limonene is stored in similar cells with secondary cell walls (LEWINSOHN et al., 1998). In some embodiments, especially in those instances where such an approach results in funneling of carbon away from cell wall production and reducing plant structural integrity, β-farnesene production can be localized to another plant compartment, such as the ground tissue cortical cells of sorghum internodes; this is accomplished by operably-linking the transgenese to promoters specific to that plant compartment. Such promoters are readily identified by those of skill in the art. For example, in sweet sorghum, the internode ground tissue cortical cells make up the majority of the internode mass (50-60%) and are involved in sucrose storage, so that a ready supply of carbon flux is available. In some embodiments, global and tissue-specific transgenes are used in the same plant cell or plant; these embodiments can be produced either by introducing all such transgenes into one host plant, or combined through crossing transgenic plants using conventional techniques.

[0136] Alternative Embodiments for Modulating β-Farnesene Synthase

[0137] β-farnesene synthase isoforms with increased substrate specificity can be engineered for increased substrate using rational engineering of the active site, which has been demonstrated for other terpene synthases (Greenhagen et al., 2006; Yoshikuni and University of California, 2007). Such engineering focuses on β-farnesene synthases previously isolated and characterized from maize and wild teosinte relatives (Köller et al., 2009). β-farnesene synthases from other plant species, including Artemisia annua (Picaud S, 2005), Japanese citrus (Maruyama T, 2001), mint (Crock J, 1997), and Douglas fir (Huber D P, 2005), have been expressed in multiple expression systems (including E. coli and yeast) and have been characterized. Such expressed proteins are modeled against known sesquiterpene synthase three-dimensional structures, and residues in and around the active site are identified and altered, generating specificity variants which are screened for improved performance.

[0138] Chloroplast Targeting

[0139] In some embodiments, instead of using signal peptides to target nuclear-encoded enzymes to pro-plastids, genes involved in β-farnesene synthesis are introduced directly into the chloroplast genome of the target plant cell or plant. In such embodiments, IPP levels are increased by transforming with MEV genes cassette, and include FDPS and β-farnesene synthase. These embodiments are especially attractive when the chloroplast genome is known or otherwise suitable insertion sites have been identified to engineer the chloroplast genome.

[0140] Generally, in the embodiments of the invention, the engineered plants producing sesquiterpenoids, including farnesene, produce such sesquiterpenoids, by dry weight, at 0.0001%, 0.001%, 0.01%, 0.1%, 1%, 2%, 3%, 4%, 5%, 6%, 7%, 8%, 9%, 10%, 11%, 12%, 13%, 14%, 15%, 16%, 17%, 18%, 19%, and 20% and more.

### B. Vector Compositions and Structure

[0141] In some embodiments, mini-chromosomes, or other large DNA constructs that can be used to introduce large numbers of genes simultaneously into the genome of a plant cell, are exploited to express the multiple genes involved in terpenoid production, such as those encoding the polypeptides shown in Tables 1-3 and further described in Tables 4-7, or the polynucleotides of Table 7. A main advantage of using mini-chromosomes, which when autonomously maintained by plant cells, is that the expression of genes carried on mini-chromosomes is not affected by position effects commonly observed in traditional engineered crops. Large gene payloads and stable expression are ideal for pathway engineering projects, and require fewer transgenic lines to be screened for commercial applications.

[0142] One aspect of the invention is related to plants containing functional, stable, autonomous MCs, preferably carrying one or more exogenous nucleic acids, such as MVA pathway and/or MEP pathway and, alternatively, IFF gene stacks. Such plants carrying MCs are contrasted to transgenic plants with genomes that have been altered by chromosomal integration of an exogenous nucleic acid. Expression of the exogenous nucleic acid results in an altered phenotype of the plant. MCs can comprise at least 1, 2, 3, 4, 5, 6, 7, 8, 9, 10, 11, 12, 13, 14, 15, 16, 17, 18, 19, 20, 21, 22, 23, 24, 25, 30, 35, 40, 45, 50, 60, 70, 80, 90, 100, 110, 120, 130, 140, 150, 250, 500, 1000 or more exogenous nucleic acids.

[0143] MCs can be transmitted to subsequent generations of viable daughter cells during mitotic cell division with a transmission efficiency of at least 1%, 5%, 10%, 20%, 30%, 40%, 50%, 60%, 70%, 80%, 85%, 90%, 95%, 96%, 97%, 98%, or 99%. The MC is transmitted to viable gametes during meiotic cell division with a transmission efficiency of at least 1%, 5%, 10%, 20%, 30%, 40%, 50%, 60%, 70%, 80%, 85%, 90%, 95%, 96%, 97%, 98%, or 99% when more than one copy of the MC is present in the gamete mother cells of the plant. The MC is transmitted to viable gametes during meiotic cell division with a transmission frequency of at least 1%, 5%, 10%, 20%, 30%, 40%, 45%, 46%, 47%, 48%, or 49% when one copy of the MC is present in the gamete mother cells of the plant and meiosis produces four viable products (e.g. typical male meiosis). When meiosis produces fewer than four viable products (e.g. typical female meiosis) a phenomenon called meiotic drive can cause the preferential segregation of particular chromosomes into the viable product resulting in higher than expected transmission frequencies of monosomes through meiosis including at least 51%, 60%, 70%, 80%, 90% 95%, 96%, 97%, 98%, or 99%. For production of seeds via sexual reproduction or by apomyxis, the MC can be transferred into at least 1%, 5%, 10%, 20%, 25%, 30%, 40%, 50%, 60%, 70%, 80%, 85%, 90%, 95%, 96%, 97%, 98%, or 99% of viable embryos when cells of the plant contain more than one copy of the MC. For sexual seed production or apomyxitic seed production from plants with one MC per cell, the MC can be transferred into at least 1%, 5%, 10%, 20%, 30%, 40%, 50%, 60%, 70%, 71%, 72%, 73%, 74%, 75% of viable embryos.

[0144] Transmission efficiency can be measured as the percentage of progeny cells or plants that carry the MC by one of several assays, including detecting expression of a reporter gene (e.g., a gene encoding a fluorescent protein), PCR detection of a sequence that is carried by the MC, RT-PCR detection of a gene transcript for a gene carried on the MC, Western analysis of a protein produced by a gene carried on the MC, Southern analysis of the DNA (either in total or a portion thereof) carried by the MC, fluorescence in situ hybridization (FISH) or in situ localization by repressor binding. Efficient transmission as measured by some benchmark percentage indicates the degree to which the MC is stable through the mitotic and meiotic cycles. Plants of the invention can also contain chromosomally integrated exogenous nucleic acid in addition to the autonomous MCs. The mini-chromosome-containing plants or plant parts, including plant tissues, can include plants that have chromosomal integration of some portion of the MC (e.g., exogenous nucleic acid or centromere sequence) in some or all cells of the plant. The plant, including plant tissue or plant cell, is still characterized as mini-chromosome-containing, despite the occurrence of some chromosomal integration. A mini-chromosome-containing plant can also have a MC plus non-MC integrated DNA.

[0145] Another aspect of the invention relates to methods for producing and isolating such mini-chromosome-containing plants containing functional, stable, autonomous MCs carrying, for example, MVA pathway, and/or MEP pathway, and/or IFF gene stacks.

[0146] Another aspect of the invention relates to methods for using MC-containing plants containing a MC carrying an MVA pathway, and/or MEP pathway, and/or IFF gene stacks for producing chemical and fuel products by appropriate expression of exogenous farnesene metabolic engineering (FME) nucleic acid(s) contained on a MC.

[0147] The invention contemplates MCs comprising centromeric nucleotide sequence that when hybridized to 1, 2, 3, 4, 5, 6, 7, 8, 9, 10, 11, 12, 13, 14, 15, 16, 17, 18, 19, 20, 30, 40, 50, 60, 70, 80, 90, 100 or more probes, under hybridization conditions described herein, e.g., low, medium or high stringency, provides relative hybridization scores, as has been previously described, such as in International Patent Application Publication No. WO2011091332.

[0148] The MC vector in some embodiments can contain a variety of elements, including: (1) sequences that function as plant centromeres; (2) one or more exogenous nucleic acids; (3) sequences that function as an origin of replication, that can be included in the region that functions as plant centromere, and optional; (4) a bacterial plasmid backbone for propagation of the plasmid in bacteria, though this element may be designed to be removed prior to delivery to a plant cell; (5) sequences that function as plant telomeres (particularly if the MC is linear); (6) optionally, additional “stuffer DNA” sequences that serve to separate the various components on the MC from each other; (7) optionally, “buffer” sequences such as MARs or SARs; (8) optionally, marker sequences of any origin, including but not limited to plant and bacterial origin; (9) optionally, sequences that serve as recombination sites; and (10) optionally, “chromatin packaging sequences” such as cohesion and condensing binding sites.

[0149] The centromere in the MC of some embodiments of the present invention can comprise centromere sequences as known in the art, which have the ability to confer to a nucleic acid the ability to segregate to daughter cells during cell division. US Pat. Nos. 6,649,347, 7,119, 250, 7,132,240 describe methods for identifying and isolating centromeres; US Pat. Nos. 7,456,013, 7,235,716, 7,227,057, and 7,226,782 disclose corn, soy, Brassica and tomato centromeres respectively; U.S. Pat. Nos. 7,989,202 and 8,062,885 described crop plant centromere compositions generally; US Patent Application Publication Nos. US20100297769 and US20090222947 also describe corn centromere compositions, international patent application publication nos. WO2011011693, WO2011091332, and WO2011011685 describe sorghum, cotton and sugar cane centromeres, respectively; and international patent application publication no. WO2009134814 describes some algae centromere compositions. Other centromere compositions are known in the art or can be identified using guidance from the aforementioned patents and patent applications. These patent application publications and issued patents are incorporated by reference herein.

[0150] For example, for Hevea MC development, Hevea genomic DNA can be isolated from etiolated seedlings. A Bacterial Artificial Chromosome (BAC) library is prepared in a modified pBeIoBAC11 vector. The library is arrayed on nylon filters and hybridized with centromere-specific satellite or centromere-associated retrotransposon sequence probes. To identify probe sequences, Hevea genomic DNA are sequenced. Centromere probes can then be amplified from genomic DNA, cloned and characterized, and FISH analysis, or other appropriate analysis technique used to confirm their centromere localization. For example, about 50 BAC clones obtained from library screening can be characterized at the molecular level and hybridized to Hevea root tip metaphase chromosome spreads. The three BAC clones with highest content of centromere satellite repeats and retrotransposon sequences, and strongest and specific hybridization to centromere regions of metaphase chromosomes can be selected to build mini-chromosomes.

[0151] Other expression vectors are well-known to those of skill in the art. In expression vectors, for example, the introduced DNA is operably-linked to elements, such as promoters, that signal to the host cell to transcribe the inserted DNA. Some promoters are exceptionally useful, such as inducible promoters that control gene transcription in response to specific factors. Operably-linking a gene of interest or anti-sense construct to an inducible promoter can control the expression of the gene of interest. Examples of inducible promoters include those that are tissue-specific, which relegate expression to certain cell types, steroid-responsive, or heat-shock reactive. Other desirable inducible promoters include those that are not endogenous to the cells in which the construct is being introduced, but, however, are responsive in those cells when the induction agent is exogenously supplied.

[0152] Plant-expressed genes from non-plant sources can be modified to accommodate plant codon usage (such as those sequences presented in Table 7), to insert preferred motifs near the translation initiation ATG codon, to remove sequences recognized in plants as 5′ or 3′ splice sites, or to better reflect plant GC/AT content. Plant genes typically have a GC content of more than 35%, and coding sequences that are rich in A and T nucleotides can be problematic. For example, ATTTA motifs can destabilize mRNA; plant polyadenylation signals such as AATAAA at inappropriate positions within the message can cause premature truncation of transcription; and monocotyledons can recognize AT-rich sequences as splice sites.

[0153] Each exogenous nucleic acid or plant-expressed gene can include a promoter, a coding region and a terminator sequence, that can be separated from each other by restriction endonuclease sites or recombination sites or both. Genes can also include introns that can be present in any number and at any position within the transcribed portion of the gene, including the 5′ untranslated sequence, the coding region, and the 3′ untranslated sequence. Introns can be natural plant introns derived from any plant, or artificial introns based on the splice site consensus that has been defined for plant species. Some intron sequences have been shown to enhance expression in plants. Optionally the exogenous nucleic acid can include a plant transcriptional terminator, non-translated leader sequences derived from viruses that enhance expression, a minimal promoter, or a signal sequence controlling the targeting of gene products to plant compartments or organelles.

[0154] The coding regions of the exogenous genes can encode any protein, including those polypeptides shown in Tables 1-3 and further described in Tables 4-7, as well as visible marker genes (for example, fluorescent protein genes, other genes conferring a visible phenotype), other screenable or selectable marker genes (for example, conferring resistance to antibiotics, herbicides or other toxic compounds, or encoding a protein that confers a growth advantage to the cell expressing the protein). Multiple genes can be placed on the same vector. The genes can be separated from each other by restriction endonuclease sites, homing endonuclease sites, recombination sites or any combinations thereof. Any number of genes can be present, especially when the vector is a MC. Genes can be in any orientation with respect to one another and with respect to the other elements of the vector (e.g. the centromere in MCs).

[0155] Vectors can also contain a bacterial plasmid backbone for propagation of the plasmid in bacteria such as E. coli, A. tumefaciens, or A. rhizogenes. The plasmid backbone can be that of a low-copy vector or mid to high level copy backbone. This backbone can contain the replicon of the F′ plasmid of E. coli. However, other plasmid replicons, such as the bacteriophage P1 replicon, or other low-copy plasmid systems, such as the RK2 replication origin, can also be used. The backbone can include one or several antibiotic-resistance genes conferring resistance to a specific antibiotic to the bacterial cell in that the plasmid is present. The backbone can also be designed so that it can be excised from the vector prior to delivery to a plant cell. The use of flanking restriction enzyme sites or flanking site-specific recombination sites are both useful for constructing a removable backbone.

[0156] MC vectors can also contain plant telomeres. An exemplary telomere sequence is tttaggg or its complement. Telomeres stabilize the ends of linear chromosomes and facilitate the complete replication of the extreme termini of the DNA molecule.

[0157] Additionally, the vector can contain “stuffer DNA” sequences that serve to separate the various components on the vector. Stuffer DNA can be of any origin, synthetic, prokaryotic or eukaryotic, and from any genome or species, plant, animal, microbe or organelle. Stuffer DNA can range from 10 bp, 20 bp, 30 bp, 40 bp, 50 bp, 60 bp, 70 bp, 80 bp, 90 bp, 100 bp, 150 bp, 200 bp, 300 bp, 400 bp 500 bp, 750 bp, 1000 bp, 2000 bp, 5000 bp, 10 kb, 20 kb, 50 kb, 75 kb, 1 Mb to 10 Mb in length and can be repetitive in sequence, with unit repeats from 10 bp to 1 Mb. Examples of repetitive sequences that can be used as stuffer DNAs include rDNA, satellite repeats, retroelements, transposons, pseudogenes, transcribed genes, microsatellites, tDNA genes, short sequence repeats and combinations thereof. Alternatively, stuffer DNA can consist of unique, non-repetitive DNA of any origin or sequence. The stuffer sequences can also include DNA with the ability to form boundary domains, such as scaffold attachment regions (SARs) or matrix attachment regions (MARs). Stuffer DNA can be entirely synthetic, composed of random sequence, having any base composition, or any A/T or G/C content.

[0158] In some embodiments of the invention, the vector is a MC that has a circular structure without telomeres. In other embodiments, the MC has a circular structure with telomeres. In a third embodiment, the MC has a linear structure with telomeres. In other embodiments, the vector is a plasmid. In yet other embodiments, multiple vectors are used, such as multiple plasmids, multiple MCs, or a combination of plasmids and MCs.

[0159] Various structural configurations of vector elements are possible. In a MC vector, a centromere can be placed on a MC either between genes or outside a cluster of genes next to a telomere. Stuffer DNAs can be combined with these configurations including stuffer sequences placed inside telomeres, around the centromere between genes or any combination thereof. Thus, a large number of alternative MC and other vector structures are possible, depending on the relative placement of centromere DNA (in the case of MCs), genes, stuffer DNAs, bacterial sequences, telomeres (in the case of MCs), and other sequences. Such variations in architecture are possible both for linear and for circular MCs. Non-MC vectors can also have such architectural variation, but will have absent elements such as functional centromeres and functional telomeres.

### C. Exemplary Plant Promoters, Regulatory Sequences and Targeting Sequences

[0160] Constitutive Expression promoters: Exemplary constitutive expression promoters include the ubiquitin promoter, the CaMV 35S promoter (U.S. Pat. Nos. 5,858,742 and 5,322,938); and the actin promoter (e.g., rice, U.S. Pat. No. 5,641,876).

[0161] Inducible Expression promoters: Exemplary inducible expression promoters include the chemically regulatable tobacco PR-1 promoter (e.g., tobacco, U.S. Pat. No. 5,614,395; maize, U.S. Pat. No. 6,429,362). Various chemical regulators can be used to induce expression, including the benzothiadiazole, isonicotinic acid, and salicylic acid compounds disclosed in U.S. Pat. Nos. 5,523,311 and 5,614,395. Other promoters inducible by certain alcohols or ketones, such as ethanol, include the alcA gene promoter from Aspergillus nidulan. Glucocorticoid-mediated induction systems can also be used (Aoyama and Chua, 1997). Another class of useful promoters are water-deficit-inducible promoters, e.g., promoters that are derived from the 5′ regulatory region of genes identified as a heat shock protein 17.5 gene (HSP 17.5), an HVA22 gene (HVA22), and a cinnamic acid 4-hydroxylasc gene (CA4H) of Zea mays. Another water-deficit-inducible promoter is derived from the rob-17 promoter. U.S. Pat. No. 6,084,089 discloses cold inducible promoters, U.S. Pat. No. 6,294,714 discloses light inducible promoters, (PEPC is also light inducible, Bansal et al. (1992) Transient expression from cab-m1 and rbcS-m3 promoter sequences is different in mesophyll and bundle sheath cells in maize leaves. PNAS 89 (8) 3654-3658), U.S. Pat. No. 6,140,078 discloses salt inducible promoters, U.S. Pat. No. 6,252,138 discloses pathogen inducible promoters, and U.S. Pat. No. 6,175,060 discloses phosphorus deficiency inducible promoters.

[0162] Wound-Inducible Promoters can Also be Used.

[0163] Tissue-Specific Promoters: Exemplary promoters that express genes only in certain tissues are useful, such as those disclosed in US Pat. Publication No. 2010-0011460. For example, root-specific expression can be attained using the promoter of the maize metallothionein-like (MTL) gene (U.S. Pat. No. 5,466,785). U.S. Pat. No. 5,837,848 discloses a root-specific promoter. Another exemplary promoter confers pith-preferred expression (maize trpA gene and promoter; WO 93/07278). Leaf-specific expression can be attained, for example, by using the promoter for a maize gene encoding phosphoenol carboxylase. Pollen-specific expression can be conferred by the promoter for the maize calcium-dependent protein kinase (CDPK) gene that is expressed in pollen cells (WO 93/07278). U.S. Pat. Appl. Pub. No. 20040016025 describes tissue-specific promoters. Pollen-specific expression can also be conferred by the tomato LAT52 pollen-specific promoter. U.S. Pat. No. 6,437,217 discloses a root-specific maize RS81 promoter, U.S. Pat. No. 6,426,446 discloses a root specific maize RS324 promoter, U.S. Pat. No. 6,232,526 discloses a constitutive maize A3 promoter, U.S. Pat. No. 6,177,611 that discloses constitutive maize promoters, U.S. Pat. No. 6,433,252 discloses a maize L3 oleosin promoter that are aleurone and seed coat-specific promoters, U.S. Pat. No. 6,429,357 discloses a constitutive rice actin 2 promoter and intron, U.S. patent application Pub. No. 20040216189 discloses an inducible constitutive leaf-specific maize chloroplast aldolase promoter. Other plant tissue specific promoters are disclosed in US Pat. Nos. 7,754,946, 7,323,622, 7,253,276, 7,141,427, 7,816,506, and 7,973,217, and in US Patent Application Publication No. 20100011460. To confer expression to mature stem cells promoters involved in secondary cell wall synthesis (Bell-Lelong et al., 1997; Liang et al., 1989; Maury et al., 1999; Nair et al., 2002) (for example, promoters for sorghum cinnamate 4-hydroxylase, coumarate 3-hydroxylase, and caffeic acid O-methyl transferase).

[0164] Optionally a plant transcriptional terminator can be used in place of the plant-expressed gene native transcriptional terminator. Exemplary transcriptional terminators are those that are known to function in plants and include the CaMV 35S terminator, the tml terminator, the nopaline synthase terminator and the pea rbcS E9 terminator. These can be used in both monocotyledons and dicotyledons.

[0165] Various intron sequences have been shown to enhance expression. For example, the introns of the maize Adh1 gene can significantly enhance expression, especially intron 1 (Callis et al., 1987). The intron from the maize bronze/gene also enhances expression. Intron sequences have been routinely incorporated into plant transformation vectors, typically within the non-translated leader. U.S. Patent Application Publication 2002/0192813 discloses 5′, 3′ and intron elements useful in the design of effective plant expression vectors.

[0166] A number of non-translated leader sequences derived from viruses are also known to enhance expression, and these are particularly effective in dicotyledonous cells (such as. Specifically, leader sequences from Tobacco Mosaic Virus (TMV, the “omega-sequence”), Maize Chlorotic Mottle Virus (MCMV), and Alfalfa Mosaic Virus (AMV) can enhance expression. Other leader sequences known and include: picornavirus leaders, for example, EMCV leader (Encephalomyocarditis 5′ noncoding region); potyvirus leaders, for example, TEV leader (Tobacco Etch Virus); MDMV leader (Maize Dwarf Mosaic Virus); human immunoglobulin heavy-chain binding protein (BiP) leader; untranslated leader from the coat protein mRNA of alfalfa mosaic virus (AMV RNA 4); tobacco mosaic virus leader (TMV); or Maize Chlorotic Mottle Virus leader (MCMV).

[0167] A minimal promoter can also be incorporated. Such a promoter has low background activity in plants when there is no transactivator present or when enhancer or response element binding sites are absent. An example is the Bzl minimal promoter, obtained from the bronze/gene of maize. A minimal promoter can also be created by use of a synthetic TATA element. The TATA element allows recognition of the promoter by RNA polymerase factors and confers a basal level of gene expression in the absence of activation.

[0168] Sequences controlling the targeting of gene products also can be included. For example, the targeting of gene products to the chloroplast is controlled by a signal sequence found at the amino terminal end of various proteins that is cleaved during chloroplast import to yield the mature protein. These signal sequences can be fused to heterologous gene products to import heterologous products into the chloroplast. DNA encoding for appropriate signal sequences can be isolated from the 5′ end of the cDNAs encoding the RUBISCO protein, the CAB protein, the EPSP synthase enzyme, the GS2 protein or many other proteins that are known to be chloroplast localized. Other gene products are localized to other organelles, such as the mitochondrion and the peroxisome (e.g., (Unger et al., 1989)). Examples of sequences that target to such organelles are the nuclear-encoded ATPases or specific aspartate amino transferase isoforms for mitochondria. Amino terminal and carboxy-terminal sequences are responsible for targeting to the ER, the apoplast, and extracellular secretion from aleurone cells. Amino terminal sequences in conjunction with carboxy terminal sequences can target to the vacuole.

[0169] Another element that can be introduced is a matrix attachment region element (MAR), such as the chicken lysozyme A element that can be positioned around an expressible gene of interest to effect an increase in overall expression of the gene and diminish position dependent effects upon incorporation into the plant genome.

[0170] Use of Non-Plant Promoter Regions Isolated from Drosophila melanogaster and Saccharomyces cerevisiae to Express Genes in Plants

[0171] Promoters can be derived from plant or non-plant species. For example, the nucleotide sequence of the promoter is derived from non-plant species for the expression of genes in plant cells, such as dicotyledon plant cells, such as guayule and Hevea sp.. Non-plant promoters can be constitutive or inducible promoters derived from insects, e.g., Drosophila melanogaster, or from yeast, e.g., Saccharomyces cerevisiae. These non-plant promoters can be operably linked to nucleic acid sequences encoding polypeptides or non-protein-expressing sequences including antisense RNA, miRNA, siRNA, and ribozymes, to form nucleic acid constructs, vectors, and host cells (prokaryotic or eukaryotic), comprising the promoters.

[0172] In the methods of the present invention, the promoter can also be a mutant of the promoters having a substitution, deletion, and/or insertion of one or more nucleotides in a native nucleic acid sequence of that element.

[0173] The techniques used to isolate or clone a nucleic acid sequence comprising a promoter of interest are known in the art.

[0174] Constructing MCs by Site-Specific Recombination

[0175] Plant MCs can be constructed using site-specific recombination sequences (for example those recognized by the bacteriophage P1 Cre recombinase, or the bacteriophage lambda integrase, or similar recombination enzymes). A compatible recombination site, or a pair of such sites, is present on both the centromere containing DNA clones and the donor DNA clones. Incubation of the donor clone and the centromere clone in the presence of the recombinase enzyme causes strand exchange to occur between the recombination sites in the two plasmids; the resulting MCs contain centromere sequences as well as MC vector sequences. The DNA molecules formed in such recombination reactions is introduced into E. coli, other bacteria, yeast or plant cells by common methods in the field including, heat shock, chemical transformation, electroporation, particle bombardment, whiskers, or other transformation methods followed by selection for marker genes, including chemical, enzymatic, or color markers present on either parental plasmid, allowing for the selection of transformants harboring MCs.

### F. Transformation of Plant Cells and Plant Regeneration

[0176] Various methods can be used to deliver DNA into plant cells. These include biological methods, such as Agrobacterium, E. coli, and viruses; physical methods, such as biolistic particle bombardment, nanocopiea device, the Stein beam gun, silicon carbide whiskers and microinjection; electrical methods, such as electroporation; and chemical methods, such as the use of polyethylene glycol and other compounds that stimulate DNA uptake into cells (Dunwell, 1999) and U.S. Pat. No. 5,464,765.

[0177] Agrobacterium-Mediated Delivery

[0178] Several Agrobacterium species mediate the transfer of T-DNA that can be genetically engineered to carry a desired piece of DNA into many plant species. Plasmids used for delivery contain the T-DNA flanking the nucleic acid to be inserted into the plant. The major events marking the process of T-DNA mediated pathogenesis are induction of virulence genes, processing and transfer of T-DNA.

[0179] There are three common methods to transform plant cells with Agrobacterium. The first method is co-cultivation of Agrobacterium with cultured isolated protoplasts. This method requires an established culture system that allows culturing protoplasts and plant regeneration from cultured protoplasts. The second method is transformation of cells or tissues with Agrobacterium. This method requires (a) that the plant cells or tissues can be modified by Agrobacterium and (b) that the modified cells or tissues can be induced to regenerate into whole plants. The third method is transformation of seeds, apices or meristems with Agrobacterium. This method requires exposure of the meristematic cells of these tissues to Agrobacterium and micropropagation of the shoots or plant organs arising from these meristematic cells.

[0180] Those of skill in the art are familiar with procedures for growth and suitable culture conditions for Agrobacterium, as well as subsequent inoculation procedures.

[0181] Transformation of dicotyledons using Agrobacterium has long been known in the art (e.g., U.S. Pat. No. 8,273,954), and transformation of monocotyledons using Agrobacterium has also been described (WO 94/00977; U.S. Pat. No. 5,591,616; US20040244075).

[0182] A number of wild-type and disarmed strains of Agrobacterium tumefaciens and Agrobacterium rhizogenes harboring Ti or Ri plasmids can be used for gene transfer into plants. Preferably, the Agrobacterium hosts contain disarmed Ti and Ri plasmids that do not contain the oncogenes that cause tumorigenesis or rhizogenesis. Exemplary strains include Agrobaclerium tumefaciens strain CSS, a nopaline-type strain that is used to mediate the transfer of DNA into a plant cell, octopine-type strains such as LBA4404 or succinamopine-type strains, e.g., EHA101 or EHA105.

[0183] The efficiency of transformation by Agrobacterium can be enhanced by using a number of methods known in the art. For example, the inclusion of a natural wound response molecule such as acetosyringone (AS) to the Agrobaclerium culture can enhance transformation efficiency with Agrobaclerium tumefaciens. Alternatively, transformation efficiency can be enhanced by wounding the target tissue to be modified or transformed. Wounding of plant tissue can be achieved, for example, by punching, maceration, bombardment with microprojectiles, etc.

[0184] In addition, transfer of a disarmed Ti plasmid without T-DNA and another vector with T-DNA containing the marker enzyme beta-glucuronidase can be accomplished into three different bacteria other than Agrobacteria which adds to the transformation vector arsenal.

[0185] Microprojectile Bombardment Delivery

[0186] In this process, the desired nucleic acid is deposited on or in small dense particles, e.g., tungsten, platinum, or gold particles, that are then delivered at a high velocity into the plant tissue or plant cells using a specialized biolistics device, such as are available from Bio-Rad Laboratories (Hercules; CA, USA). The advantage of this method is that no specialized sequences need to be present on the nucleic acid molecule to be delivered into plant cells.

[0187] For bombardment, cells in suspension are concentrated on filters or solid culture medium. Alternatively, immature embryos, seedling explants, or any plant tissue or target cells can be arranged on solid culture medium. The cells to be bombarded are positioned at an appropriate distance below the microprojectile stopping plate.

[0188] Various biolistics protocols have been described that differ in the type of particle or the manner in that DNA is coated onto the particle. Any technique for coating microprojectiles that allows for delivery of transforming DNA to the target cells can be used. For example, particles can be prepared by functionalizing the surface of a gold oxide particle by providing free amine groups. DNA, having a strong negative charge, binds to the functionalized particles.

[0189] Parameters such as the concentration of DNA used to coat microprojectiles can influence the recovery of transformants containing a single copy of the transgene

[0190] Other physical and biological parameters can be varied, such as manipulation of the DNA/microprojectile precipitate, factors that affect the flight and velocity of the projectiles, manipulation of the cells before and immediately after bombardment (including osmotic state, tissue hydration and the subculture stage or cell cycle of the recipient cells), the orientation of an immature embryo or other target tissue relative to the particle trajectory, and also the nature of the transforming DNA, such as linearized DNA or intact supercoiled plasmids. Physical parameters such as DNA concentration, gap distance, flight distance, tissue distance, and helium pressure, can be optimized.

[0191] The particles delivered via biolistics can be “dry” or “wet.” In the “dry” method, the DNA-coated particles such as gold are applied onto a macrocarrier (such as a metal plate, or a carrier sheet made of a fragile material, such as mylar) and dried. The gas discharge then accelerates the macrocarrier into a stopping screen that halts the macrocarrier but allows the particles to pass through. The particles are accelerated at, and enter, the plant tissue arrayed below on growth media. The media supports plant tissue growth and development and are suitable for plant transformation and regeneration. Those of skill in the art are aware that media and media supplements such as nutrients and growth regulators for use in transformation and regeneration and other culture conditions such as light intensity during incubation, pH, and incubation temperatures can be optimized.

[0192] Those of skill in the art can use, devise, and modify selective regimes, media, and growth conditions depending on the plant system and the selective agent. Typical selective agents include antibiotics, such as geneticin (G418), kanamycin, paromomycin; or other chemicals, such as glyphosate or other herbicides.

[0193] Vector Transformation with Selectable Marker Gene

[0194] Vector-modified cells in bombarded calluses or explants can be isolated using a selectable marker gene. The bombarded tissues are transferred to a medium containing an appropriate selective agent. Tissues are transferred into selection between 0 and about 7 days or more after bombardment. Selection of modified cells can be further monitored by tracking fluorescent marker genes or by the appearance of modified explants (modified cells on explants can be green under light in selection medium, while surrounding non-modified cells are weakly pigmented). In plants that develop through shoot organogenesis (e.g., Brassica, tomato or tobacco), the modified cells can form shoots directly, or alternatively, can be isolated and expanded for regeneration of multiple shoots transgenic for the vector. In plants that develop through embryogenesis (e.g., corn or soybean), additional culturing steps may be necessary to induce the modified cells to form an embryo and to regenerate in the appropriate media.

[0195] For selection to be effective, the plant cells or tissue need to be grown on selective medium containing the appropriate concentration of antibiotic or killing agent, and the cells need to be plated at a defined and constant density. The concentration of selective agent and cell density are generally chosen to cause complete growth inhibition of wild type plant tissue that does not express the selectable marker gene; but allowing cells containing the introduced DNA to grow and expand into mini-chromosome-containing clones. This critical concentration of selective agent typically is the lowest concentration at that there is complete growth inhibition of wild type cells, at the cell density used in the experiments. However, in some cases, sub-killing concentrations of the selective agent can be equally or more effective for the isolation of plant cells containing the exogenous DNA, especially in cases where the identification of such cells is assisted by a visible marker gene (e.g., fluorescent protein gene) present on the introduced DNA.

[0196] In some species (e.g., tobacco or tomato), a homogenous clone of modified cells can also arise spontaneously when bombarded cells are placed under the appropriate selection. An exemplary selective agent is the neomycin phosphotransferase II (NptII) marker gene that confers resistance to the antibiotics kanamycin, G418 (geneticin) and paramomycin. In other species, or in certain plant tissues or when using particular selectable markers, homogeneous clones may not arise spontaneously under selection; in this case the clusters of modified cells can be manipulated to homogeneity using the visible marker genes present on the vectors as an indication of that cells contain the introduced DNA.

[0197] Regeneration of Vector-Containing Plants from Explants to Mature, Rooted Plants

[0198] For plants that develop through shoot organogenesis (e.g., sorghum, sugar cane, Brassica, tomato and tobacco), regeneration of a whole plant involves culturing of regenerable explant tissues taken from sterile organogenic callus tissue, seedlings or mature plants on a shoot regeneration medium for shoot organogenesis, and rooting of the regenerated shoots in a rooting medium to obtain intact whole plants with a fully developed root system.

[0199] For plant species, such cotton, corn and soybean, regeneration of a whole plant occurs via an embryogenic step that is not necessary for plant species where shoot organogenesis is efficient. In these plants, the explant tissue is cultured on an appropriate media for embryogenesis, and the embryo is cultured until shoots form. The regenerated shoots are cultured in a rooting medium to obtain intact whole plants with a fully developed root system.

[0200] Explants are obtained from any tissues of a plant suitable for regeneration. Exemplary tissues include hypocotyls, internodes, roots, cotyledons, petioles, cotyledonary petioles, leaves and peduncles, prepared from sterile seedlings or mature plants.

[0201] Explants are wounded (for example with a scalpel or razor blade) and cultured on a shoot regeneration medium (SRM) containing Murashige and Skoog (MS) medium as well as a cytokinin, e.g., 6-benzylaminopurinc (BA), and an auxin, e.g., a-naphthaleneacetic acid (NAA), and an anti-ethylene agent, e.g., silver nitrate (AgNO₃). For example, 2 mg/L of BA, 0.05 mg/L of NAA, and 2 mg/L of AgNO₃ can be added to MS medium for shoot organogenesis. The most efficient shoot regeneration is obtained from longitudinal sections of internode explants.

[0202] Shoots regenerated via organogenesis are rooted in a MS medium containing low concentrations of an auxin such as NAA.

[0203] To regenerate a whole plant that has been transformed, for example, explants are pre-incubated for 1 to 7 days (or longer) on the shoot regeneration medium prior to bombardment. Following bombardment, explants are incubated on the same shoot regeneration medium for a recovery period up to 7 days (or longer), followed by selection for transformed shoots or clusters on the same medium but with a selective agent appropriate for a particular selectable marker gene.

### G. Analyses of Transformed Plants

[0204] MC Autonomy Demonstration by In Situ Hybridization

[0205] While not necessary for the embodiments of the invention, it can be desirable to have a delivered MC maintained autonomously in the plant cell. To assess whether the MC is autonomous from the native plant chromosomes or has integrated into the plant genome, in situ hybridizations can be used, such as fluorescent in situ hybridization (FISH). In this assay, mitotic or meiotic tissue, such as root tips or meiocytes from the anther, possibly treated with metaphase arrest agents such as colchicines is obtained, and standard FISH methods are used to label both the centromere and sequences specific to the MC. For example, a Sorghum centromere is labeled using a probe from a sequence that labels all Sorghum centromeres, attached to one fluorescent tag, such as one that emits the red visible spectrum (ALEXA FLUOR® 568, for example (Invitrogen; Carlsbad, Calif.)), and sequences specific to the MC are labeled with another fluorescent tag, such as one emitting in the green visible spectrum (ALEXA FLUOR® 488, for example). All centromere sequences are detected with the first tag; only MCs are detected with both the first and second tag. Chromosomes are stained with a DNA-specific dye including but not limited to DAPI, Hoechst 33258, OliGreen, Giemsa YOYO, and TOTO. An autonomous MC is visualized as a body that shows hybridization signal with both centromere probes and MC specific probes and is separate from the native chromosomes.

[0206] Methods of detecting and characterizing MCs and other related techniques, including identifying centromeres for new plants can be found, for example, in U.S. Pat. Nos. 8,062,885 and 8,350,120 and US Patent Application Publication No. 2013007927.

[0207] Determination of Gene Expression Levels

[0208] The expression level of any gene present on vectors can be determined by several methods, such as for RNA, Northern Blot hybridization, Reverse Transcriptase-PCR, binding levels of a specific RNA-binding protein, in situ hybridization, or dot blot hybridization; or for proteins, Western blot hybridization, Enzyme-Linked Immunosorbant Assay (ELISA), fluorescent quantitation of a fluorescent gene product, enzymatic quantitation of an enzymatic gene product, immunohistochemical quantitation, or spectroscopic quantitation of a gene product that absorbs a specific wavelength of light.

[0209] Clonal Propagation of Transgenic Plants

[0210] To produce multiple clones of plants from a transgenic plant, any tissue of the plant can be tissue-cultured for shoot organogenesis using regeneration procedures already described. Alternatively, multiple auxiliary buds can be induced from a modified plant by excising the shoot tip, rooting the tip, and subsequently growing the tip into a plant; each auxiliary bud can be rooted and produce a whole plant.

### D. Field Evaluation of Transgenic Plants

[0211] Transgenic plant cell lines are regenerated, proliferated (to make genetically-identical replicates of each transgenic line), rooted, acclimated and used in field trials. For seed-bearing plants, seed is collected and segregated.

[0212] Descriptor data from typical plants of each transgenic accession plus tissue-cultured and regenerated from wild type and empty vector lines is collected at regular intervals over at least a year or more, depending on the type of plant transformed and is easily determined by one of skill in the art. Descriptors for which data can be collected include:
[0213] a. Morphological: flower color and size, seed size and weight, leaf color, leaf size, leaf margin teeth, number of branches from the main stem.
[0214] b. Growth: plant height and width, fresh and dry weight.
[0215] c. Chemical: farnesene, total resin, and total hydrocarbon content.
[0216] d. Phenology: first flower date, 50% bloom date, and seed maturity date (first seed harvest).
[0217] e. Seed production: total seed mass and weight
[0218] f. Imaging: digital images of entire plants, and of the leaves, flowers and seeds.
   Descriptor data (morphological, chemical, phonological, growth, production, and imaging) are collected, descriptive statistics performed and results analyzed. Seeds from selected transgenic lines that approach or meet the predetermined target are further propagated for large scale field trials. In this experiment, secondary input targets such as water requirements fertilizer requirement, and management practices are typically evaluated.

[0219] In the cases of increased terpenoid production, such as farnesene, NIR can be used to follow farnesene accumulation during the growing season. Plants from the field trials can also provide the materials needed for the initial extraction scale-up. Experiments can also be conducted to determine the stability of farnesene post-harvest in whole, chopped and chipped plants, and under a range of storage conditions varying time, temperature and humidity (Coffelt et al., 2009; Cornish et al., 2000a; Cornish et al., 2000b; McMahan et al., 2006).

### E. Processing of Transgenic Plants for Terpenoid Biofuel (Exemplified with Farnasene)

[0220] Extraction of Farnesene from Transgenic Feedstock

[0221] In previous studies, farnesene has been extracted from plant tissues using solid-phase microextraction (SPME) (Demyttenaere et al., 2004; Zini et al., 2003), subcritical CO₂ extraction (Rout et al., 2008), microwave-assisted solvent extraction (Serrano and Gallego, 2006), and two-stage solvent extraction (Pechous et al., 2005). Ionic liquid methods to extract aromatic and aliphatic hydrocarbons (Arce et al., 2008; Arce et al., 2007) can also be used for farnesene extraction. These techniques are useful on a small scale. While chipped and ground dry plants, sometimes coupled with pellitization, have been effectively extracted using solvents, further disruption or poration of plant cell walls may increase extraction efficiency. The effect of various pretreatment methods can be tested, including mild alkali or acid treatment, ammonia explosion, and steam explosion, on extraction efficiency and product purity. Ultrasound-assisted extraction (Hernanz et al., 2008), liquid-liquid extraction at high pressure, and/or high temperature also may assist in solvent penetration (into the cell wall) and improve farnesene extraction.

[0222] Extraction methods can be tested and scaled through three stages: (1) individual plant analyses, (2) 0.5-5 L batch extractions, and (3) pilot scale extraction. Hexane, pentane and chloromethane (Edris et al., 2008; Mookdasanit et al., 2003), have been used as solvents for farnesene extraction, and acetone for resin extraction can also be tested. Alternative solvents, such as ethyl lactate and 2,3 butanediol, which allow large-scale operation at higher temperatures for effective solvent distribution ratio and selectivity. Samples of transgenic plants are dried and ground using lab or hammer mills, depending on the scale required. Following solvent selection, the 0.5-5 L experiments can initially use published biomass to solvent ratios and other parameters (Arce et al., 2007; Lai et al., 2005; Mookdasanit et al., 2003; Pechous et al., 2005; Serrano and Gallego, 2006; Zheng et al., 2004), including those previously described (Ananda and Vadlani, 2010a; Ananda and Vadlani, 2010b), (Oberoi et al., 2010). The best temperature, agitation rate, extraction time, substrate:solvent ratio, moisture content of biomass, and temperature range obtained can be determined by one of skill in the art to develop the design of experiments using response surface methodology (Brijwani et al., 2010). The optimal parameters inform selection of the solvent system (s) in which farnesene exhibits the greatest solubility and the highest partition coefficient. The quality of the extractant can be analyzed with gas chromatography-mass spectrometry (GC-MS), and farnesene content can be quantified using ¹H and ¹³C NMR (Zheng et al., 2004). Pilot studies can provide the relevant data for optimization of β-farnesene extraction in terms of solvent choice, solubility, yield, and solvent recoverability.

[0223] Conversion of Farnesene to Farnesane

[0224] The β-farnesene-rich material from the extraction process can be hydrogenated via metal catalysis in a high-pressure Parr reactor. Since hydrogenation is an established process for conversion of olefins in chemical industry, various industrial-grade metal catalysts can be used (Gounder and Iglesia, 2011; Knapik et al., 2008; Zhang et al., 2003), such as palladium on carbon, and platinum, copper or nickel supported on alumina (or other acidic support). Catalyst loading (10-90 g/L), farnesene concentration (100-600 g/L), compressed hydrogen flow (40-100 psig), temperature (40-80° C.), and reaction time, can be optimized for efficient farnesane production. Catalytic efficiency can be characterized before and after hydrogenation using Fourier transform infrared spectroscopy (FTIR) and X-ray diffraction, with respect to carbon selectivity, operating parameters (temperature, pressure), reaction time, and final farnesane purity. Reaction completion can be determined using gas chromatography-flame ionization detection (GC-FID). These data inform performance of medium scale (50-1000 L) trials for efficient farnesane production from transgenic plants.

### DEFINITIONS

[0225] “Autonomous” means, when referring to MCs, that when delivered to plant cells, at least some MCs are transmitted through mitotic division to daughter cells and are episomal in the daughter plant cells, i.e., are not chromosomally integrated in the daughter plant cells. Daughter plant cells that contain autonomous MCs can be selected for further propagation using, for example, selectable or screenable markers. During the introduction into a cell of a MC, or during subsequent stages of the cell cycle, there may be chromosomal integration of some portion or all of the DNA derived from a MC in some cells. The MC is still characterized as autonomous despite the occurrence of such events if a plant, plant part or plant tissue can be regenerated that contains episomal descendants of the MC distributed throughout its parts, or if gametes or progeny can be derived from the plant that contain episomal descendants of the MC distributed through its parts.

[0226] “Centromere” is any DNA sequence that confers an ability to segregate to daughter cells through cell division. This sequence can produce a transmission efficiency to daughter cells ranging from about 1% to about 100%, including to about 5%, 10%, 20%, 30%, 40%, 50%, 60%, 70%, 80%, 90% or about 95% of daughter cells. Variations in transmission efficiency can find important applications within the scope of the invention; for example, MCs carrying centromeres that confer 100% stability could be maintained in all daughter cells without selection, while those that confer 1% stability could be temporarily introduced into a transgenic organism, but later eliminated when desired. In particular embodiments of the invention, the centromere can confer stable transmission to daughter cells of a nucleic acid sequence, including a recombinant construct comprising the centromere, through mitotic or meiotic divisions, including through both mitotic and meiotic divisions. A plant centromere is not necessarily derived from plants, but has the ability to promote DNA transmission to daughter plant cells.

[0227] “Circular permutations” refer to variants of a sequence that begin at base n within the sequence, proceed to the end of the sequence, resume with base number one of the sequence, and proceed to base n−1. For this analysis, n can be any number less than or equal to the length of the sequence. For example, circular permutations of the sequence ABCD are: ABCD, BCDA, CDAB, and DABC.

[0228] “Control sequences” are DNA sequences that enable the expression of an operably-linked coding sequence in a particular host organism. Prokaryotic control sequences include promoters, operator sequences, and ribosome binding sites. Eukaryotic cells utilize promoters, polyadenylation signals, and enhancers.

[0229] “Derivatives” are polynucleotide or amino acid sequences formed from native compounds either directly, by modification or partial substitution. “Analogs” are polynucleotide or amino acid sequences that have a structure similar, but not identical to, the native compound but differ from it in respect to certain components or side chains. Analogs may be synthetic or from a different evolutionary origin and may have a similar or opposite metabolic activity compared to wild type. Homologs are polynucleotide sequences or amino acid sequences of a particular gene that are derived from different species.

[0230] Derivatives and analogs may be full length or other than full length if the derivative or analog contains a modified polynucleotide or amino acid.

[0231] A “homologous polynucleotide sequence” or “homologous amino acid sequence,” or variations thereof, refer to sequences characterized by a homology at the polynucleotide level or amino acid level as discussed above. Homologous polynucleotide sequences encode those sequences coding for isoforms of the polypeptides shown in Tables 1-3 and further described in Tables 4-7. Isoforms can be expressed in different tissues of the same organism as a result of, for example, alternative splicing. Homologous polynucleotide sequences may encode conservative amino acid substitutions, as well as a polypeptide possessing similar biological activity.

[0232] “Exogenous” when used in reference to a nucleic acid, for example, refers to any nucleic acid that has been introduced into a recipient cell, regardless of whether the same or similar nucleic acid is already present in such a cell. An “exogenous gene” can be a gene not normally found in the host genome in an identical context, or an extra copy of a host gene. The gene can be isolated from a different species than that of the host genome, or alternatively, isolated from the host genome but operably linked to one or more regulatory regions that differ from those found in the unaltered, native gene. The gene can also be synthesized in vitro.

[0233] “Functional” or “activity” when referring to a MC, centromere, nucleic acid, or polypeptide, for example, retains a biological and/or an immunological activity of native or naturally-occurring chromosome, centromere, nucleic acid, or polypeptide, respectively. When used to describe an exogenous nucleic acid carried on a vector, “functional” means that the exogenous nucleic acid can function in a detectable manner when the vector is within a cell, such as a plant cell; exemplary functions of the exogenous nucleic acid include transcription of the exogenous nucleic acid, expression of the exogenous nucleic acid, regulatory control of expression of other exogenous nucleic acids, recognition by a restriction enzyme or other endonuclease, ribozyme or recombinase; providing a substrate for DNA methylation, DNA glycoslation or other DNA chemical modification; binding to proteins such as histones, helix-loop-helix proteins, zinc binding proteins, leucine zipper proteins, MADS box proteins, topoisomerases, helicases, transposases, TATA box binding proteins, viral protein, reverse transcriptases, or cohesins; providing an integration site for homologous recombination; providing an integration site for a transposon, T-DNA or retrovirus; providing a substrate for RNAi synthesis; priming of DNA replication; aptamer binding; or kinetochore binding. If multiple exogenous nucleic acids are present within the vector, the function of one or preferably more of the exogenous nucleic acids can be detected under suitable conditions permitting function. A functional or active polypeptide can be one that retains at least one biological activity, such as an enzymatic activity.

[0234] “Isolated,” when referred to a molecule, refers to a molecule that has been identified and separated and/or recovered from a component of its natural environment. Contaminant components of its natural environment are materials that interfere with diagnostic or other use.

[0235] A “mini-chromosome” (“MC”) is a recombinant DNA construct including a centromere and capable of transmission to daughter cells. A MC can remain separate from the host genome (as episomes) or can integrate into host chromosomes. The stability of this construct through cell division could range between from about 1% to about 100%, including about 5%, 10%, 20%, 30%, 40%, 50%, 60%, 70%, 80%, 90% and about 95%. The MC construct can be a circular or linear molecule. It can include elements such as one or more telomeres, origin of replication sequences, stuffer sequences, buffer sequences, chromatin packaging sequences, linkers and genes. The number of such sequences included is only limited by the physical size limitations of the construct itself. It can contain DNA derived from a natural centromere, although it can be preferable to limit the amount of DNA to the minimal amount required to obtain a transmission efficiency in the range of 1-100%. The MC can also contain a synthetic centromere composed of tandem arrays of repeats of any sequence, either derived from a natural centromere, or of synthetic DNA. The MC can also contain DNA derived from multiple natural centromeres. The MC can be inherited through mitosis or meiosis, or through both meiosis and mitosis. The term MC specifically encompasses and includes the terms “plant artificial chromosome” or “PLAC,” or engineered chromosomes or micro-chromosomes and all teachings relevant to a PLAC or plant artificial chromosome specifically apply to constructs within the meaning of the term MC.

[0236] “Operably linked” is a configuration in that a control sequence, e.g., a promoter sequence, directs transcription or translation of another sequence, for example a coding sequence. For example, a promoter sequence could be appropriately placed at a position relative to a coding sequence such that the control sequence directs the production of a polypeptide encoded by the coding sequence.

[0237] “Percent (%) amino acid sequence identity” is defined as the percentage of amino acid residues that are identical with amino acid residues in a sequence, such as those shown in Tables 1-3 and further described in Tables 4-7, in a candidate sequence when the two sequences are aligned. To determine % amino acid identity, sequences are aligned and if necessary, gaps are introduced to achieve the maximum % sequence identity; conservative substitutions are not considered as part of the sequence identity. Amino acid sequence alignment procedures to determine percent identity are well known to those of skill in the art. Publicly available computer software such as BLAST, BLAST2, ALIGN2 or Megalign (DNASTAR) can be used to align polypeptide sequences. Those skilled in the art can determine appropriate parameters for measuring alignment, including any algorithms needed to achieve maximal alignment over the full length of the sequences being compared.

[0238] When amino acid sequences are aligned, the % amino acid sequence identity of a given amino acid sequence A to, with, or against a given amino acid sequence B (which can alternatively be phrased as a given amino acid sequence A that has or comprises a certain % amino acid sequence identity to, with, or against a given amino acid sequence B) can be calculated as:

% amino acid sequence identity=X/Y·100

[0239] where

[0240] X is the number of amino acid residues scored as identical matches by the sequence alignment program's or algorithm's alignment of A and B

[0241] and

[0242] Y is the total number of amino acid residues in B.

[0243] If the length of amino acid sequence A is not equal to the length of amino acid sequence B, the % amino acid sequence identity of A to B will not equal the % amino acid sequence identity of B to A.

[0244] In addition to naturally-occurring allelic variants of the polynucleotides useful in the invention, changes can be introduced into the polynucleotides that incur alterations in the amino acid sequence of the encoded polypeptides but does not alter polypeptide function. For example, amino acid substitutions at “non-essential” amino acid residues can be made. A “non-essential” amino acid residue is a residue that can be altered from the amino acid sequence of the polypeptides shown in Tables 1-3 and further described in Tables 4-7 without altering the polypeptides' biological activity, whereas an “essential” amino acid residue is required for biological activity.

[0245] Useful conservative substitutions are shown in Table 8, “Preferred substitutions.” Conservative substitutions whereby an amino acid of one class is replaced with another amino acid of the same type fall within the scope of the subject invention so long as the substitution does not materially alter the biological activity (although in some cases, enhanced biological activity is desirable). If such substitutions result in a change in biological activity, then more substantial changes, indicated in Table 9 as exemplary, are introduced and the products screened for biological activity.

TABLE 8
Preferred substitutions

| | | Preferred |
|---|---|---|
| Original residue | Exemplary substitutions | substitutions |
| Ala (A) | Val, Leu, Ile | Val |
| Arg (R) | Lys, Gln, Asn | Lys |
| Asn (N) | Gln, His, Lys, Arg | Gln |
| Asp (D) | Glu | Glu |
| Cys (C) | Ser | Ser |
| Gln (Q) | Asn | Asn |
| Glu (E) | Asp | Asp |
| Gly (G) | Pro, Ala | Ala |
| His (H) | Asn, Gln, Lys, Arg | Arg |
| Ile (I) | Leu, Val, Met, Ala, Phe, Norleucine | Leu |
| Leu (L) | Norleucine, Ile, Val, Met, Ala, Phe | Ile |
| Lys (K) | Arg, Gln, Asn | Arg |
| Met (M) | Leu, Phe, Ile | Leu |
| Phe (F) | Leu, Val, Ile, Ala, Tyr | Leu |
| Pro (P) | Ala | Ala |
| Ser (S) | Thr | Thr |
| Thr (T) | Ser | Ser |
| Trp (W) | Tyr, Phe | Tyr |
| Tyr (Y) | Trp, Phe, Thr, Ser | Phe |
| Val (V) | Ile, Leu, Met, Phe, Ala, Norleucine | Leu |

[0246] Non-conservative substitutions that affect (1) the structure of the polypeptide backbone, such as a β-sheet or α-helical conformation, (2) the charge or (3) hydrophobicity, or (4) the bulk of the side chain of the target site can modify GPCR-like RAIG1 polypeptide function or immunological identity. Residues are divided into groups based on common side-chain properties as denoted in Table B. Non-conservative substitutions entail exchanging a member of one of these classes for another class. Substitutions may be introduced into conservative substitution sites or more preferably into non-conserved sites.

TABLE 9
Amino acid classes

| Class | Amino acids |
|---|---|
| hydrophobic | Norleucine, Met, Ala, Val, Leu, Ile |
| neutral hydrophilic | Cys, Ser, Thr |
| acidic | Asp, Glu |
| basic | Asn, Gln, His, Lys, Arg |
| disrupt chain conformation | Gly, Pro |
| aromatic | Trp, Tyr, Phe |

[0247] The variant polypeptides can be made using methods known in the art such as oligonucleotide-mediated (site-directed) mutagenesis, alanine scanning, and PCR mutagenesis. Site-directed mutagenesis, cassette mutagenesis, restriction selection mutagenesis or other known techniques can be performed on cloned DNA to produce variants.

[0248] “Percent (%) polynucleotide sequence identity” polynucleotide sequences is defined as the percentage of polynucleotides in the sequence of interest that are identical with the polynucleotides in a candidate sequence, after aligning the sequences and introducing gaps, if necessary, to achieve the maximum percent sequence identity. Alignment can be achieved in various ways well-known in the art; for instance, using publicly available software such as BLAST, BLAST-2, ALIGN or Megalign (DNASTAR) software. Those skilled in the art can determine appropriate parameters for measuring alignment, including any necessary algorithms to achieve maximal alignment over the full length of the sequences being compared.

[0249] When polynucleotide sequences are aligned, the % polynucleotide sequence identity of a given polynucleotide sequence C to, with, or against a given polynucleotide sequence D (which can alternatively be phrased as a given polynucleotide sequence C that has or comprises a certain % polynucleotide sequence identity to, with, or against a given polynucleotide sequence D) can be calculated as:

% polynucleotide sequence identity=W/Z·100

[0250] where

[0251] W is the number of polynucleotides scored as identical matches by the sequence alignment program's or algorithm's alignment of C and D

[0252] and

[0253] Z is the total number of polynucleotides in D.

[0254] When the length of polynucleotide sequence C is not equal to the length of polynucleotide sequence D, the % polynucleotide sequence identity of C to D will not equal the % polynucleotide sequence identity of D to C.

[0255] “Sorghum” means Sorghum bicolor (primary cultivated species), Sorghum almum, Sorghum am plum, Sorghum angustum, Sorghum rundinaceum, Sorghum brachypodum, Sorghum bulbosum, Sorghum burmahicum, Sorghum controversum, Sorghum drummondii, Sorghum carinatum, Sorghum exstans, Sorghum grande, Sorghum halepense, Sorghum interjectum, Sorghum intrans, Sorghum laxiflorum, Sorghum leiocladum, Sorghum macrospermum, Sorghum matarankense, Sorghum miliaceum, Sorghum nigrum, Sorghum nitidum, Sorghum plumosum, Sorghum propinquum, Sorghum purpureosericeum, Sorghum stipoideum, Sorghum timorense, Sorghum trichocladum, Sorghum versicolor, Sorghum virgatum, and Sorghum vulgare (including but not limited to the variety Sorghum vulgare var. sudanens also known as sudangrass). Hybrids of these species are also of interest in the present invention as are hybrids with other members of the Family Poaceae.

[0256] “Sugar cane” refers to any species or hybrid of the genus Saccharum, including: S. acinaciforme, S. aegyptiacum, S. alopecuroides (Silver Plume Grass), S. alopecuroideum, S. alopecuroidum (Silver Plumegrass), S. alopecurus, S. angustifolium, S. antillarum, S. arenicola, S. argenteum, S. arundinaceum (Hardy Sugar Cane (USA)), S. arundinaceum var. trichophyllum, S. asper, S. asperum, S. atrorubens, S. aureum, S. balansae, S. baldwini, S. baldwinii (Narrow Plumegrass), S. barberi (Cultivated sugar cane), S. barbicostatum, S. beccarii, S. bengalense (Munj Sweetcane), S. benghalense, S. bicorne, S. biflorum, S. boga, S, brachypogon, S. bracteatum, S. brasilianum, S. brevibarbe (Short-Beard Plume Grass), S. brevibarbe var. brevibarbe (Shortbeard Plumegrass), S. brevibarbe var. contortum (Shortbeard Plumegrass), S. brevifolium, S. brunneum, S. caducam, S. canaliculatum, S. capense, S. casi, S. caudatum, S. cayennense, S. cayennense var. gemiimim, S. cayennense var. laxiusculum, S. chinense, S. ciliare, S. coarctatum (Compressed Plumegrass), S. confertum, S. conjugatun, S. contortum, S. contortum var. contortum, S. contractum, S. cotuliferum, S. cylindricum, S. cylindricum var. contractum, S. cylindricum var. longifolium, S. deciduum, S. densum, S. diandrum, S. dissitiflorum, S. distichophyllum, S. dubium, S. ecklonii, S. edule, S. elegans, S. elephantinum, S. erianthoides, S. europaeum, S. exaltatum, S. fasciculatum, S. fastigiatum, S. fatuum, S. filifolium, S. filiforme, S. floridulun, S. formosanum, S. fragile, S. fulvum, S. fuscum, S. giganteum (sugar cane Plume Grass), S. glabrum, S. glaga, S. glaucum, S. glaza, S. grandiflorum, S. griffit ii, S. hildebrandtii, S. hirsutum, S. holcoides, S. holcoides var. warmingianum, S. hookeri, S. hybrid, S. hybridum, S. indum, S. infirmum, S. insulare, S. irritans, S. jaculatorium, S. jamaicense, S. japonicum, S. juncifolium, S. kajkaiense, S. kanashiroi, S. klagha, S. koenigii, S. laguroides, S. longifolium, S. longisetosum, S. longisetosum var. hookeri, S. longisetum, S. lota, S. luzonicum, S. macilentum, S. macrantherum, S. maximum, S. mexicanum, S. modhara, S. monandrum, S. moonja, S. munja, S. munroanum, S. muticum, S. narenga (arenga sugar cane), S. negrosense, S. obscurum, S. occidentale, S. officinale, S. officinalis, S. officinarum (Cultivated sugar cane), S. officinarum ‘Cheribon’, S. officinarum Otaheite’, S. officinarum Tele's Smoke’ (Black Magic Repellent Plant), S. officinarum L. ‘Laukona’, S. officinarum L. ‘Violaceum’, S, officinarum var. brevipedicellatum, S. officinarum var. officinarum, S. officinarum var. violaceum (Burgundy-Leaved sugar cane), S. pallidum, S. paniceum, S. panicosum, S. pappiferum, S. parviflorum, S. pedicellare, S. perrieri, S. polydactylum, S. polystachyon, S. polystachyum, S. porphyrocomum, S. procerum, S. propinquum, S. punctatum, S. rara, S. rarum, S. ravennae (Hardy Pampas Plume Grass), S. repens, S. reptans, S. ridleyi, S. robustum (Wild New Guinean Cane), S. roseum, S. rubicundum, S. rufum, S. sagittatum, S. sanguineum, S. sape, S. sara, S. scindicus, S. semidecumbens, S. sibiricum, S. sikkhnense, S. sinense (Cultivated sugar cane), S. sisca, S. sorghum, S. speciosissimum, S. sphacelatum, S. spicatum, S. spontaneum (Wild Sugar Cane), S. spontaneum var. insulare, S. spontanum, S. stenophyllum, S. stewartii, S. strictum, S. teneriffae, S. ternatum, S. thunbergii, S. tinctorium, S. tridentatum, S. trinii, S. tristachyum, S. velutinum, S. versicolor, S. viguieri, S. villosum, S. violaceum, S. wardii, S. warmingianum, S. williamsii.

[0257] “Guayule” means the desert shrub, Parthenium argentatum, native to the southwestern United States and northern Mexico and which produces polymeric isoprene essentially identical to that made by Hevea rubber trees (e.g., Hevea brasiliensis) in Southeast Asia.

[0258] “Hevea” means Hevea brasiliensis, the Para rubber tree.

[0259] “Hybridizes under low stringency, medium stringency, and high stringency conditions” describes conditions for hybridization and washing. Hybridization is a well-known technique (Ausubel, 1987). Low stringency hybridization conditions means, for example, hybridization in 6× sodium chloride/sodium citrate (SSC) at about 45° C., followed by two washes in 0.5×SSC, 0.1% SDS, at least at 50° C.; medium stringency hybridization conditions means, for example, hybridization in 6×SSC at about 45° C., followed by one or more washes in 0.2×SSC, 0.1%) SDS at 55° C.; and high stringency hybridization conditions means, for example, hybridization in 6×SSC at about 45° C., followed by one or more washes in 0.2×SSC, 0.1% SDS at 65° C. Another non limiting example of stringent hybridization conditions are hybridization in a high salt buffer comprising 6×SSC, 50 mM Tris HCl (pH 7.5), 1 mM EDTA, 0.02% PVP, 0.02% Ficoll, 0.02% BSA, and 500 mg/ml denatured salmon sperm DNA at 65° C., followed by one or more washes in 0.2×SSC, 0.01% BSA at 50° C. Another non limiting example of moderate stringency hybridization conditions are hybridization in 6×SSC, 5×Denhardt's solution, 0.5% SDS and 100 mg/ml denatured salmon sperm DNA at 55° C., followed by one or more washes in 1×SSC, 0.1% SDS at 37° C. Another non limiting example of low stringency hybridization conditions are hybridization in 35% formamide, 5×SSC, 50 mM Tris HCl (pH 7.5), 5 mM EDTA, 0.02% PVP, 0.02% Ficoll, 0.2% BSA, 100 mg/ml denatured salmon sperm DNA, 10% (wt/vol) dextran sulfate at 40° C., followed by one or more washes in 2×SSC, 25 mM Tris HCl (pH 7.4), 5 mM EDTA, and 0.1% SDS at 50° C. Other conditions of low stringency that may be used are well known in the art (e.g., as employed for cross species hybridizations).

[0260] “Inducible promoter” means a promoter induced by the presence or absence of a biotic or an abiotic factor.

[0261] “Plant part” includes pollen, silk, endosperm, ovule, seed, embryo, pods, roots, cuttings, tubers, stems, stalks, fiber (lint), square, boll, fruit, berries, nuts, flowers, leaves, bark, wood, whole plant, plant cell, plant organ, epidermis, vascular tissue, protoplast, cell culture, crown, callus culture, petiole, petal, sepal, stamen, stigma, style, bud, meristem, cambium, cortex, pith, sheath, or any group of plant cells organized into a structural and functional unit. In one preferred embodiment, the exogenous nucleic acid is expressed in a specific location or tissue of a plant, for example, epidermis, vascular tissue, meristem, cambium, cortex, pith, leaf, sheath, flower, root or seed.

[0262] “Polypeptide” does not refer to a specific length of the encoded product and, therefore, encompasses peptides, oligopeptides, and proteins. “Exogenous polypeptide” means a polypeptide that is not native to the plant cell, a native polypeptide in that modifications have been made to alter the native sequence, or a native polypeptide whose expression is quantitatively altered as a result of a manipulation of the plant cell by recombinant DNA techniques.

[0263] “Promoter” is a DNA sequence that allows the binding of RNA polymerase (including but not limited to RNA polymerase I, RNA polymerase II and RNA polymerase Ill from eukaryotes), and optionally other accessory or regulatory factors, and directs the polymerase to a downstream transcriptional start site of a nucleic acid sequence encoding a polypeptide to initiate transcription. RNA polymerase effectively catalyzes the assembly of messenger RNA complementary to the appropriate DNA strand of the coding region.

[0264] A “promoter operably linked to a heterologous gene” is a promoter that is operably linked to a gene or other nucleic acid sequence that is different from the gene to that the promoter is normally operably linked in its native state. Similarly, an “exogenous nucleic acid operably linked to a heterologous regulatory sequence” is a nucleic acid that is operably linked to a regulatory control sequence to that it is not normally linked in its native state.

[0265] “Regulatory sequence” refers to any DNA sequence that influences the efficiency of transcription or translation of any gene. The term includes sequences comprising promoters, enhancers and terminators.

[0266] “Repeated nucleotide sequence” refers to any nucleic acid sequence of at least 25 bp present in a genome or a recombinant molecule, other than a telomere repeat, that occurs at least two or more times and that are preferably at least 80% identical either in head to tail or head to head orientation either with or without intervening sequence between repeat units.

[0267] “Retroelement” or “retrotransposon” refers to a genetic element related to retroviruses that disperse through an RNA stage; the abundant retroelements present in plant genomes contain long terminal repeats (LTR retrotransposons) and encode a polyprotein gene that is processed into several proteins including a reverse transcriptase. Specific retroelements (complete or partial sequences (e.g., “retroelement-like sequence” and “retrotransposon-like sequence”) can be found in and around plant centromeres and can be present as dispersed copies or complex repeat clusters. Individual copies of retroelements can be truncated or contain mutations; intact retrolements are rarely encountered.

[0268] “Satellite DNA” refers to short DNA sequences (typically <1000 bp) present in a genome as multiple repeats, mostly arranged in a tandemly repeated fashion, as opposed to a dispersed fashion. Repetitive arrays of specific satellite repeats are abundant in the centromeres of many higher eukaryotic organisms.

[0269] “Screenable marker” is a gene whose presence results in an identifiable phenotype. This phenotype can be observed under standard conditions, altered conditions such as elevated temperature, or in the presence of certain chemicals used to detect the phenotype. The use of a screenable marker allows for the use of lower, sub-killing antibiotic concentrations and the use of a visible marker gene to identify clusters of transformed cells, and then manipulation of these cells to homogeneity. Examples of screenable markers include genes that encode fluorescent proteins that are detectable by a visual microscope such as the fluorescent reporter genes DsRed, ZsGreen, ZsYellow, AmCyan, Green Fluorescent Protein (GFP). An additional preferred screenable marker gene is lac.

[0270] “Structural gene” is a sequence that codes for a polypeptide or RNA and includes 5′ and 3′ ends. The structural gene can be from the host into which the structural gene is transformed or from another species. A structural gene usually includes one or more regulatory sequences that modulate the expression of the structural gene, such as a promoter, terminator or enhancer. Structural genes often confer some useful phenotype upon an organism comprising the structural gene, for example, herbicide resistance. A structural gene can encode an RNA sequence that is not translated into a protein, for example a tRNA or rRNA gene.

[0271] “Synthetic,” when used in the context of a polynucleotide or polypeptide, refers to a molecule that is made using standard synthetic techniques, e.g., using an automated DNA or peptide synthesizer. Synthetic sequence can be a native sequence, or a modified sequence.

[0272] “Terpenes” are derived from five-carbon isoprene units, which have the molecular formula C₅H₈. A “sesquiterpene” has 3 isoprene units and has the molecular formula C₁₅H₂₄. “Terpenoids” or “isoprenoids” are terpenes that are biochemically modified, such as by oxidation or rearrangement. A “sesquiterpenoid” has 3 isoprene units, such as sesquiterpene, and is biochemically modified.

[0273] “Transformed,” “transgenic,” “modified,” and “recombinant” refer to a host organism such as a plant into which an exogenous or heterologous nucleic acid molecule has been introduced, and includes whole plants, meiocytes, seeds, zygotes, embryos, endosperm, or progeny of such plants that retain the exogenous or heterologous nucleic acid molecule but that have not themselves been subjected to the transformation process.

TABLE OF SELECTED ABBREVIATIONS

| Abbreviation | Definition |
|---|---|
| AACT | Acetoacetyl-CoA thiloase |
| ASE | accelerated solvent extraction |
| β-FS | β-farnesene synthase |
| CCE | carbon capture enhancement |
| CMK | 4-diphosphocytidyl-2-C-methyl-D-erythritol kinase |
| CMS | 2-C-methyl-D-erythritol 4-phosphate cytidylyltransferase |
| DMAPP | dimethylallyl pyrophosphat |
| DXP | deoxyxylulose-5-phosphate |
| DXR | deoxyxylulose-5-phosphate reductoisomerase |
| DXS | 1-deoxy-D-xylulose-5-phosphate synthase |
| FME | farnesene metabolic engineering |
| FPP | farnesyl pyrophosphate |
| FPPS | farnesene diphosphate synthase |
| FDPS | farnesyl diphosphate synthase |
| FTIR | Fourier transform infrared spectroscopy |
| FS | farnesene synthase |
| GC | gas chromatography |
| GC-FID | gas chromatography-flame ionization detection |
| GD, GPP | geranyl diphosphate |
| GPPS | farnesyl diphosphate synthase |
| HDR | hydroxymethylbutenyl diphosphate reductase |
| HDS | 4-hydroxy-3-methylbut-2-en-1-yl diphosphate synthase |
| HMG-CoA | hydroxymethylglutaryl-coenzyme A |
| HMGR | 3-hydroxy-3-methylglutaryl coenzyme A reductase |
| HMGS | 3-hydroxy-3-methylglutaryl coenzyme A synthase |
| HPLC | High-pressure liquid chromatography |
| IPP | isopentenyl pyrophosphate |
| IPPI | isopentenyl-diphosphate delta-isomerase |
| LC/MS | liquid chromatography/mass pectrometry |
| MC, MCs | mini-chromosome(s) |
| MCS | hydroxymethylglutaryl-CoA synthase |
| MEP | methylerthritol phosphate pathway |
| MK | mevalonate kinase |
| MPD | mevalonate phyrophosphate decarboxylase |
| MVA | mevalonic acid pathway |
| NIR | near infrared |
| PMK | phosphomevalonate kinase |
| PMI | phosphomannose isomerase |
| RSM | response surface methodology |
| SPME | solid-phase microextraction |

### EXAMPLES

[0274] The following examples are meant to only exemplify the invention, not to limit it in any way. One of skill in the art can envision many variations and methods to practice the invention.

### Example 1

### Identification of Candidate Genes that Encode for MVA and MEP Pathway Enzymes

[0275] The various enzymes that are involved in the MVA pathway, the MEP pathway, and FSS pathway can be used to produce farnesene were identified in plants or in microorganisms such as E. coli, fungi, and plants.

[0276] The protein sequences of the biochemically characterized genes encoding the MVA or MEP pathway were then used as a query to search publically available protein databases to identify protein homologs. The closest protein sequence with the highest homology to the query sequence from each organism was considered as the putative candidate protein sequence. Tables 1-7 summarize the polypeptides and nucleic acid sequences that were identified and further selected for the embodiments of the invention.

### Example 2

### Quantify Baseline Terpene Profiles in Sorghum Plants to Identify Key Intermediates and Products of Terpene Pathway

[0277] Extraction of terpene from plant samples was carried out using Mini-Bead Beater—16 instrument (Biospec Products, Catalog number 607; Bartlesville, Okla., USA). Polypropylene microvial (7 mL, Biospec Products, Catalog number 3205) was used for extraction. Ground leaf/stem/callus (1.5 g), dichloromethane (3.0 mL, Fisher Scientific, catalog number D151SK-4) and 6 chrome-steel beads (3.2 mm diameter, Biospec Products, Catalog number 11079132c) were taken in the microvial and bead beaten for 90 seconds (30 second×3 times). Vials were cooled in ice bath between two consecutive beating cycles. Volume of supernatant collected after extraction was 2 mL. 1 mL of it was transferred to a 2 mL microcentrifuge tube (VWR International, Catalog number 89000-028; Radnor, Pa., USA) and centrifuged for 10 minutes at 4° C. at 10,000 rpm. 500 microL of the centrifuged solution was transferred to GC vial and spiked with 50 microL of 1,2,3-trichlorobenzene (Acros Organics, Catalog number AC13939-2500; Thermo Fisher Scientific, N.J., USA) stock solution in DCM (5 mg/mL).

[0278] GC was run in Shimadzu GC 2014 instrument (Shimadzu; Kyoto, Japan) using an Agilent HP-5 column (Agilent Technologies, Inc.; Santa Clara, Calif., USA). The following GC conditions were used for the analysis. 1 microL of samples was injected using a splitless injection mode. Injection port was held at 250° C. and sampling time was 1 minute with Helium as carrier gas. The following flow control mode was used with a Pressure: 103.1 kPa and a total flow of 6.4 mL/minute and a column flow of 1.14 mL/minute. The linear velocity was 29.3 cm/sec with a purge flow of 3.0 mL/minute. The following column temperature gradient was used: 80° C. for 2 minute, increased to 150° C. with a gradient of 3.5° C./minute and held at 150° C. for 15 minute, increased to 250° C. with a gradient of 10° C./minute, held at 250° C. for 2 minute for a total run time of 49 minutes. Flame ionization detector at a temperature of 250° C. was used for detecting compounds that were eluted.

[0279] For GC-MS analysis, samples were extracted as for GC analysis except for the following changes. 100 microL of the centrifuged solution was transferred to GC vial, diluted with 100 microL dichloromethane and spiked with 10 microL of 1,2,3-trichlorobenzene (Acros Organics, Catalog number AC13939-2500) stock solution in dichloromethane (5 mg/mL).

[0280] GC-MS was run in Agilent 6890N GC with an Agilent 122-5562 DB-5 ms column coupled to an Agilent 5975N quadrupole selective mass detector. The following GC conditions were used for the analysis. 1 microL of samples was injected using a splitless injection mode. Injection port was held at 280° C. and sampling time was 1 minute with Helium carrier gas. The following flow control mode was used with a pressure of 19.02 psi and a total flow of 5.9 mL/minute and a column flow of 1 mL/minute. The linear velocity was maintained at 26 cm/sec with a purge flow of 2.0 mL/minute. The following column temperature gradient was used; 80° C. for 2 minutes then increased to 280° C. with a gradient of 5° C./minute and held at 280° C. for 18 minutes for a total run time of 60 minutes. The following MS conditions were used for data acquisition. Scan acquisition mode with a solvent delay of 9 minutes. Scan parameters we set to detect compounds with low mass of 50 and high mass of 650. The MS quad temperature was maintained at 150° C. and MS source at 230° C.

[0281] Metabolites of the MVA pathway were quantified using liquid chromatography triple-quadrupole mass spectrometry (LC-MS/MS). Briefly, flash-frozen plant tissues were triple-ground to a fine powder with liquid nitrogen, extracted overnight in methanol (10 mL/g tissue; aloin [0.2 μg/ml] was added as an internal standard) at room temperature and filtered. Samples were dried and resuspended in methanol, and MVA pathway intermediates were quantified using LC-MS/MS methodologies based on previously published protocols (Nagel et al. [2012] Nonradioactive assay for detecting isoprenyl diphosphate synthase activity in crude plant extracts using liquid chromatography coupled with tandem mass spectrometry. Anal. Biochem. 422: 33-38). The results of LC-MS/MS analyses are summarized in Table 10.

[0282] Our data show that, as expected, in both guayule and sorghum MVA pathway intermediates make up only a small fraction of the total fresh weight. Additionally, with the exception of FPP in leaves of the sweet sorghum line Rio (R10), all MVA pathway intermediates are present in guayule (data not shown) at concentrations 3-(e.g. IPP) to 100-(in the case of MVAP in stem tissues) fold more than in sorghum. In most cases, guayule metabolite abundances data correlated with the relative abundance of their cognate transcripts (data not shown).

TABLE 10
LC-MS quantification of MVA pathway intermediates in guayule (AZ101)
and sorghum (R10 and TX430) leaves and stems¹

| Tissue | | MVA | MVAP | MVAPP | IPP | GPP | FPP |
|---|---|---|---|---|---|---|---|
| R10 leaf | % frozen | 1.01E−03 | 0 | 0 | 1.28E−03 | 0 | 5.52E−06 |
| | weight | | | | | | |
| | std. dev. | 2.75E−04 | 0 | 0 | 3.08E−04 | 0 | 7.79E−07 |
| R10 stem | % frozen | 1.00E−05 | 6.40E−07 | 1.61E−05 | 3.77E−04 | 0 | 0 |
| | weight | | | | | | |
| | std. dev. | 8.75E−06 | 1.11E−06 | 8.79E−06 | 5.92E−05 | 0 | 0 |
| TX430 leaf | % frozen | 2.58E−04 | 2.52E−06 | 2.18E−05 | 5.15E−04 | 0 | 0 |
| | weight | | | | | | |
| | std. dev. | 3.87E−05 | 2.21E−06 | 7.82E−06 | 1.16E−04 | 0 | 0 |
| TX430 stem | % frozen | 1.38E−05 | 6.13E−07 | 1.51E−05 | 3.39E−04 | 0 | 0 |
| | weight | | | | | | |
| | std. dev. | 4.20E−06 | 1.06E−06 | 2.11E−06 | 8.35E−05 | 0 | 0 |

¹Metabolite values are presented as % frozen tissue mass, and represent the mean of three biological replicates, with standard deviations. The limits of detection (LOD) in ng loaded onto the column, for each compound were 0.15 for HMG-CoA, MVA, MVAP, MVAPP, and GPP; LOD for IPP and FPP was 0.0075 ng. Zero (0) represents values below LOD. HMG-CoA was below limits of detection in all samples and is therefore not reported.

[0283] Elicitors of Sesquiterpene Metabolism in Sorghum

[0284] Elicitors such as methyl jasmonate (MeJ), salicylic acid (SA), ethephon and benzothiadiazole (BTH) that are known to induce sesquiterpene metabolism in plants were applied to induce farnesene and other sesquiterpene biosynthesis in sorghum. Rapidly growing young leaves from 40-day old sorghum plants were excised at the base and immediately place in a flask containing 4 mM of SA and 4 mM MeJ. As a control, leaves were treated with water, and each treatment replicated three times. In both experiments, samples collected after induction were immediately frozen in liquid nitrogen and analyzed by GC within 24 hours of collection. Results from GC analysis clearly showed that the sorghum leaf samples were induced by MeJ after 30 hours of induction and multiple compounds with retention time similar to sesquiterpenes were seen in GC chromatogram (FIG. 9). A compound with same retention time as β-farnesene (21.1 min) was produced in samples that were induced by MeJ. The GC-MS analysis confirmed the key sesquiterpenes that are induced in sorghum leaves as farnesene and caryophyllene. We expect transgenic plants over-expressing the key MVA or MEP pathway genes to produce higher levels of farnesene as compared to non-transformed plants when induced.

### Example 3

### Determine the Relative Steady-State Transcript Levels of Endogenous Terpene Pathway Genes in Sorghum Normalized to Respective Housekeeping Genes

[0285] Sorghum Microarray Design and Production

[0286] Sorghum microarrays were designed (Affymetrix; Santa Clara, Calif., USA). The probes for ˜27,500 genes were designed based on the whole genome sequence of Sorghum bicolor genotype BTx623, available at Phytozome (Paterson A H, et al. (2009). “The Sorghum bicolor genome and the diversification of grasses.” Nature 457, 551-556). The gene sequences were downloaded from the FTP site of Phytozome and parsed into an instruction file format. Overall, we have 150,337 probe selection regions representing the exons and UTRs. Over 1.4 million probes were designed for 27,500 predicted transcripts designed for 150,000 unique exons as well as the microRNA sequences downloaded from noncoding RNA sequence database (Kin T., et al. 2007. fRNAdb: a platform for mining/annotating functional RNA candidates from non-coding RNA sequences. Nucleic Acids Res, 35(Database issue):D145-8).

[0287] Selection of Sorghum Tissues for Gene Expression Profiling

[0288] Tissues collected from field experiments during 2011 were leveraged for gene expression profiling and discovery of stem-specific promoters. These samples consist of tissues from seedling shoots, seedling roots, shoot meristems, leaves, stems and dissected stem tissues (pith and rind) selected from six diverse genotypes. RNA was isolated from 79 samples and the microarray analysis was conducted by Precision Biomarker Resources, Inc. (Evanston, Ill., USA).

[0289] Microarray Data Analysis

[0290] Microarray data were analyzed using Partek Genomic Suite 6.6 software (Partek, Inc.; Saint Louis, Mo., USA). The data from CEL files was normalized using the gcRMA algorithm with background adjustments for probe sequence. The log 2 normalized data from exons was used to conduct analysis of variance (ANOVA). The candidate MVA and MEP pathway genes identified from sorghum were analyzed by microarray to determine the relative gene expression levels in various tissues as compared to housekeeping genes actin and ubiquitin. For a given tissue, the gene expression data was normalized as percentage of actin (Sb01g010030) gene expression. The results of the analysis suggest that there was substantial difference in gene expression among the MVA (Table 11) and MEP (Table 12) pathway genes within a tissue and among the tissues. In comparison to HMGR (the known rate-limiting MVA pathway gene in plants), AACT and HMGS genes showed relatively higher expression in various sorghum tissues while the rest of the MVA pathway genes showed similar or lower gene expression. We also observed a similar trend in guayule with higher number of AACT transcripts as compared to HMGR.

TABLE 11
Steady-state transcript levels of sorghum MVA pathway genes
relative to sorghum actin gene transcript¹

| Gene | | | | | | | | |
|---|---|---|---|---|---|---|---|---|
| Name | Gene ID | Root | Shoot | Leaf | Meristem | Internode | Pith | Rind |
| FPPS-1 | Sb03g032280.1 | 6.9 | 38.7 | 205.1 | 23.3 | 19.6 | 23.4 | 19.9 |
| FPPS-2 | Sb09g027190.1 | 21.0 | 10.5 | 8.3 | 15.9 | 17.2 | 28.3 | 17.6 |
| IPPI-1 | Sb02g035700.1 | 8.4 | 10.7 | 30.8 | 5.4 | 4.5 | 8.2 | 5.7 |
| IPPI-2 | Sb09g020370.1 | 3.2 | 7.2 | 23.4 | 6.4 | 9.9 | 14.0 | 10.4 |
| PMK | Sb01g040900.1 | 5.3 | 8.0 | 21.9 | 6.0 | 7.6 | 14.1 | 7.1 |
| MPD | Sb04g035950.1 | 10.4 | 12.3 | 18.7 | 13.4 | 14.5 | 23.9 | 14.1 |
| MK | Sb04g001220.1 | 4.1 | 4.5 | 6.6 | 4.4 | 5.7 | 9.1 | 5.9 |
| HMGR-1 | Sb07g027480.1 | 13.0 | 18.7 | 47.4 | 14.3 | 17.3 | 39.5 | 14.7 |
| HMGR-2 | Sb02g028630.1 | 14.7 | 24.3 | 63.8 | 15.5 | 21.2 | 36.2 | 17.6 |
| HMGS-1 | Sb02g030270.1 | 30.5 | 32.9 | 22.4 | 42.6 | 31.8 | 47.2 | 26.6 |
| HMGS-2 | Sb07g025240.1 | 9.1 | 20.3 | 79.6 | 3.4 | 19.4 | 25.5 | 24.8 |
| HMGS-3 | Sb01g049310.1 | 10.4 | 19.7 | 51.4 | 8.8 | 4.3 | 3.0 | 6.6 |
| AACT-1 | Sb08g023050.1 | 20.5 | 31.6 | 86.0 | 21.1 | 25.6 | 31.0 | 23.3 |
| AACT-2 | Sb01g033360.1 | 12.3 | 12.1 | 19.2 | 9.3 | 17.1 | 14.4 | 10.3 |
| Actin | Sb01g010030 | 100.0 | 100.0 | 100.0 | 100.0 | 100.0 | 100.0 | 100.0 |
| ubiquitin | Sb10g027470 | 62.3 | 97.7 | 233.2 | 50.7 | 100.0 | 264.4 | 163.8 |

¹Data are presented in percentages as compared to actin gene expression

TABLE 12
Steady-state transcript levels of sorghum MEP pathway genes
relative to sorghum actin gene transcript¹

| Gene | | | | | | | | |
|---|---|---|---|---|---|---|---|---|
| Name | Gene ID | Root | Shoot | Leaf | Meristem | Internode | Pith | Rind |
| HDR | Sb01g009140.1 | 3.8 | 18.5 | 112.6 | 4.1 | 9.6 | 19.7 | 13.9 |
| HDS | Sb04g025290.1 | 3.4 | 25.8 | 176.6 | 4.1 | 11.4 | 20.6 | 14.2 |
| MCS | Sb04g031830.1 | 1.2 | 3.8 | 19.8 | 1.3 | 2.1 | 3.5 | 2.4 |
| CMK | Sb03g037310.1 | 2.6 | 14.4 | 87.6 | 4.1 | 6.2 | 8.5 | 6.9 |
| CMS | Sb03g042160.1 | 2.0 | 4.0 | 25.5 | 1.9 | 3.6 | 4.0 | 3.9 |
| DXR | Sb03g008650.1 | 13.5 | 58.9 | 312.5 | 5.1 | 17.1 | 21.8 | 22.6 |
| DXS | Sb09g020140.1 | 3.8 | 30.2 | 152.5 | 6.3 | 15.3 | 17.9 | 17.7 |
| DXS | Sb02g005380.1 | 1.7 | 2.4 | 14.6 | 0.9 | 1.7 | 2.8 | 2.1 |
| DXS | Sb10g002960.1 | 11.0 | 17.9 | 67.5 | 9.8 | 22.6 | 35.2 | 25.2 |
| Actin | Sb01g010030 | 100.0 | 100.0 | 100.0 | 100.0 | 100.0 | 100.0 | 100.0 |
| ubiquitin | Sb10g027470 | 62.3 | 97.7 | 233.2 | 50.7 | 100.0 | 264.4 | 163.8 |

¹Data is presented in percentages as compared to actin gene expression

### Example 4

### Metabolon FME Gene Stack Constructs

[0291] We have identified genes necessary to transfer the entire MVA pathway as a putative metabolon (a structural-functional complex formed between sequential enzymes of a metabolic pathway that facilitates substrate channeling from one enzymatic transformation to the next, resulting in high biosynthetic rates) from Saccharomyces cerevisiae and Hevea brasiliensis to improve flux into β-farnesene biosynthesis (See Tables 1-7). Although there is extensive functional characterization of the terpenoid pathway in Hevea, MVA pathway genes (Sando et al (2008) Biosci Biotechnol Biochem 72:2049-60) were selected from this species because of the inherent ability of Hevea to produce substantial amounts of terpenoid compounds. Thus, as a metabolon of physically associated, functionally interacting enzymes, the Hevea MVA pathway represents a significant opportunity to obtain maximal rates of acetyl CoA conversion into terpenoid precursors.

[0292] In this approach, seven key enzymes that are essential for the conversion of Acetyl CoA to IPP and DMAPP are over-expressed in addition to FPPS and FS to produce β-farnesene. These include the enzymes acetoacetyl-CoA thiolase (AACT); 3-hydroxy-3-methylglutaryl coenzyme A synthase (HMGS); 3-hydroxy-3-methylglutaryl coenzyme A reductase (HMGR); mevalonate kinase (MK); phosphomevalonate kinase (PMK); mevalonate pyrophosphate decarboxylase (MPD) and isopentenyl-diphosphate delta-isomerase (IPPI), farnesene diphosphate synthase (FPPS) and β-farnesene synthase (β-FS). Because of its ease of transformation, sugar cane was used as a surrogate system to test the MVA pathway metabolon concept to produce β-farnesene. Once the metabolon concept was tested in sugar cane, a limited number of constructs that show promising results were further evaluated in sorghum.

### Example 5

### Design FME Gene Stack Constructs to Test MVA Pathway Metabolon

[0293] We engineered the MVA pathway metabolon (nine genes) constructs in sorghum and sugar cane via a combination of gene stacking and co-transformation. To enable rapid gene construction and to accommodate nine genes, we subdivided the genes that encode the MVA pathway into three gene constructs. Construct 1 contained genes that code for the three rate-limiting enzymes (HMGR, FPPS and β-FS) and the selectable marker (NPTII) for selecting transgenic events. Construct 2 contained two genes (AACT and HMGS) that encode enzymes upstream of the key rate-limiting enzyme HMGR. Construct 3 contained four genes (MK, PMK, MPD and IPPI) that encode enzymes downstream of HMGR. A list of constructs designed to engineer the MVA pathway metabolon are shown in Table 13.

TABLE 13
Constructs to express whole MVA pathway

| Construct | | Construct 1 | | Construct 2 | | Construct 3 | |
|---|---|---|---|---|---|---|---|
| Set | Description* | Promoter | Genes | Promoter | Genes | Promoter | Genes |
| So10 | Constitutive expression | Ubiquitin | HMGR | SCBV2 | AACT | PRP3.0 | MK |
| | of complete MVA | | | | | | |
| | pathway from fungi. | | | | | | |
| | | Actin | FPPS | SCBV2 | HMGS | PRP3.0 | PMK |
| | | Ubiquitin | β-FS | | | PRP3.0 | MPD |
| | | YAT | NPTII | | | PRP3.0 | IPPI |
| So4 | Lignifying cell-preferred | OMT1 | HMGR | SCBV2 | AACT | PRP3.0 | MK |
| | expression of complete | | | | | | |
| | MVA pathway from | | | | | | |
| | fungi. | | | | | | |
| | | OMT1 | FPPS | SCBV2 | HMGS | PRP3.0 | PMK |
| | | OMT1 | β-FS | | | PRP3.0 | MPD |
| | | YAT | NPTII | | | PRP3.0 | IPPI |
| So11 | Constitutive expression | Ubiquitin | HMGR | SCBV2 | AACT | PRP3.0 | MK |
| | of complete MVA | | | | | | |
| | pathway from Hevea. | | | | | | |
| | | Actin | FPPS | SCBV2 | HMGS | PRP3.0 | PMK |
| | | Ubiquitin | β-FS | | | PRP3.0 | MPD |
| | | YAT | NPTII | | | PRP3.0 | IPPI |
| So6 | Lignifying cell-preferred | OMT1 | HMGR | SCBV2 | AACT | PRP3.0 | MK |
| | expression of complete | | | | | | |
| | MVA pathway from | | | | | | |
| | Hevea. | | | | | | |
| | | OMT1 | FPPS | SCBV2 | HMGS | PRP3.0 | PMK |
| | | OMT1 | β-FS | | | PRP3.0 | MPD |
| | | YAT | NPTII | | | PRP3.0 | IPPI |
| Control | Vector with selectable | YAT | NPTII | | | | |
| | marker | | | | | | |

*For description of target expressed polypeptides and associated polynucleotides, please see Tables 1-7.

### Example 6

### Introduction of MVA Constructs into Sugar Cane Plant Cells

[0294] Sugar cane variety L97-128 was bombarded with the sets of constructs shown in Table 13 using standard protocols (Frame et al., 2000). For bombardment, DNA amount equivalent to 60 billion molecules for each construct was coated on to 1.8 mg of 0.6 μM gold particles and precipitated using 2.5M CaCl₂ and 0.1M spermidine for 2 hrs following standard protocol (Frame et al., 2000). The precipitated DNA-gold particles was dissolved in 36 μl ethanol and delivered into 60 days old sugar cane green or white callus using the Biorad PDS-1000 gene gun (Bio-Rad; Hercules, Calif., USA). Each precipitation was bombarded into 6 plates (10 billion molecules of DNA/shot). The parameters used for bombardment were 7 cm target distance; a vacuum of 27.5 Hg; 1100 psi rupture disc. Next day after bombardment, the calli were transferred on to selection medium (DBC3 medium) containing 20 mg/I geneticin and cultured at 28° C., under light for 2 weeks. Three rounds of selection were followed to obtain the transgenic calli events. The transgenic callus events were regenerated on half MS medium and rooted on half MS medium containing 15 mg/I geneticin. The regenerated transgenic plants were transferred to soil mix in 24 well flat, placed in environmental growth chamber at 28° C. for 5-8 days. The flats were then transferred to green house and placed under a mist bench for one week. The well-grown transgenic plants were finally transplanted into 1.6 gallon pots with soil:peat:perlite (1:1:1) and grown to maturity.

[0295] Initial results suggest that ˜90% of the events selected on G418 were positive for the NPTII gene and out of those, ˜25-75% contained all genes of interest depending on the number of genes expected to be present (25% when 9 or more genes are expected to be present in a co-transformation experiments with 3 constructs and 75% or higher when 3 genes are present in a single construct). Selected events were transferred to the greenhouse for plant growth. In total, we generated 339 sugar cane events from 7 experiments with 189 of the events containing all genes of interest. 94 of the events with entire MVA metabolon or with partial set of genes were planted in soil (Table 14).

TABLE 14
Summary of sugar cane transformation experiments

| | | | | # Events |
|---|---|---|---|---|
| | | NPTII PCR+ | All GOI+ | Transferred |
| Construct | Description | Events | Events | to soil |
| So4a | Lignified cell expression, yeast/E. coli MVA + | 36 | 23 | 23 |
| | ScFPPS + Aa FS | | | |
| So4b | Lignified cell expression, yeast MVA metabolon + | 84 | 19 | 19 |
| | ScFPPS + Aa FS | | | |
| So6 | Lignified cell expression, Hevea MVA metabolon + | 32 | 24 | 19 |
| | HbFPPS + Aa FS | | | |
| So10 | Constitutive expression of yeast MVA | 53 | 29 | 14 |
| | metabolon + ScFPPS + Aa FS | | | |
| So11b | Constitutive expression of Hevea MVA | 52 | 29 | 10 |
| | metabolon + HbFPPS + Aa FS) | | | |
| Control | NPTII/GFP | 15 | 15 | 5 |

GOI, genes of interest

### Example 7

### Introduction of MVA Constructs into Sorghum Plant Cells

[0296] Grain sorghum inbred line TX430 was transformed by biolistics. Calli were bombarded with 0.6 μm diameter gold particles coated with plasmid DNA (3 μg DNA per shot per construct) at a vacuum of 14 psi inside a PDS-1000/He Biolistic® Particle Delivery System (Bio-Rad). The constructs used and a description of the genes of interest is given in Table 15. To date, we have generated 99 sorghum events from 6 experiments with 32 of the events containing the entire MVA metabolon.

TABLE 15
Summary of sorghum MVA-metabolon experiments

| | | NPTII | | # Events |
|---|---|---|---|---|
| | | PCR+ | All GOI+ | Transferred |
| Construct | Description | Events | Events | to soil |
| Sb4a | Lignified cell expression, yeast/E. coli MVA + | 13 | 4 | 11 |
| | ScFPPS + Aa FS | | | |
| Sb4b | Lignified cell expression, yeast MVA | 21 | 6 | 12 |
| | metabolon + ScFPPS + Aa FS | | | |
| Sb6 | Lignified cell expression, Hevea MVA | 38 | 13 | 31 |
| | metabolon + HbFPPS + Aa FS | | | |
| Sb10 | Constitutive expression of yeast MVA | 9 | 1 | 8 |
| | metabolon + ScFPPS + Aa FS | | | |
| Sb11 | Constitutive expression, Hevea MVA | 10 | 0 | 2 |
| | metabolon + HbFPPS (without Aa FS) | | | |
| Sb11b | Constitutive expression, Hevea MVA | 2 | 1 | 1 |
| | metabolon + HbFPPS + Aa FS | | | |
| Control | NPTII/GFP | 16 | 16 | 4 |

GOI, genes of interest

### Example 8

### Evaluate Sugar Cane Events Containing the MVA Pathway Metabolic Operon for Transgene and Protein Expression, and Sesquiterpene Production

[0297] We completed terpene profiling of wild type sugar cane samples by GC and GC-MS analysis. As in the case of sorghum (see Example 2), we induced wild type sugar cane leaves with 4 mM methyl jasmonate for 30 hours to observe any increase in sesquiterpene content. Wild-type sugar cane leaf samples that were induced with MeJ produced higher and measurable levels of farnesene, caryophyllene and other sesquiterpenes as compared to leaves treated with water (FIG. 10). GC-MS analysis confirmed that the compounds that were produced by MeJ induction were caryophyllene and farnesene (data not shown).

### Example 9

### Analysis of Sorghum Transgenic Events by Multi-PLEX PCR Analysis to Determine Presence or Absence of Genes of Interest Comprising the MVA Metabolon Containing the MVA Pathway Metabolic Operon

[0298] Multi-PLEX PCR analysis using gene-specific primers was developed to determine the presence or absence of genes for selectable marker NPTII, endogenous gene ADH1 as internal control, genes comprising the entire MVA metabolon (7 genes: AACT, HMGS, HMGR, MK, PMK, MPD and IPPI) and FPPS and FS. The results of the multiplex PCR analysis of events selected for GC analysis from Sb4, Sb6 and Sb10 experiments are shown in Tables 16 to 18. In Sb4b experiment, transgenic events 402, 403, 248 and 251 contained all genes of interest while the event 401 was missing few of the MVA pathway genes and hence do not represent the entire MVA metabolon. In Sb6 experiment, events 233, 244, 406 and 407 contained all genes of interest while some of the other events were missing few of the MVA pathway genes and hence do not represent the entire MVA metabolon. In Sb10 experiment, transgenic event 418 contained all genes of interest while the event 415 was missing few of the MVA pathway genes and hence do not represent the entire MVA metabolon.

TABLE 16
MULTIPLEX PCR result of Sb4 sorghum events selected for GC analysis¹

| Event | | | | | | | | | | | |
|---|---|---|---|---|---|---|---|---|---|---|---|
| ID | adh1 | nptii | sc_aact | sc_hmgs | sc_hmgr | sc_mk | sc_pmk | sc_mpd | sc_ippi | sc_fpps | aa_bfs |
| 402 | 1 | 1 | 1 | 1 | 1 | 1 | 1 | 1 | 1 | 1 | 1 |
| 403 | 1 | 1 | 1 | 1 | 1 | 1 | 1 | 1 | 1 | 1 | 1 |
| 401 | 1 | 1 | 1 | 1 | 1 | 0 | 0 | 0 | 1 | 1 | 1 |
| 248 | 1 | 1 | 1 | 1 | 1 | 1 | 1 | 1 | 1 | 1 | 1 |
| 251 | 1 | 1 | 1 | 1 | 1 | 1 | 1 | 1 | 1 | 1 | 1 |
| Control | | | | | | | | | | | |

¹presence of a gene of interest is denoted by 1 and absence is denoted by 0.

TABLE 17
MULTIPLEX PCR result of Sb6 sorghum events selected for GC analysis¹

| Event | | | | | | | | | | | |
|---|---|---|---|---|---|---|---|---|---|---|---|
| ID | adh1 | nptii | hb_aact | hb_hmgs | hb_hmgr | hb_mk | hb_pmk | hb_mpd | hb_ippi | hb_fpps | aa_bfs |
| 242 | 1 | 1 | 0 | 0 | 1 | 1 | 1 | 1 | 1 | 1 | 1 |
| 236 | 1 | 1 | 0 | 1 | 1 | 0 | 0 | 0 | 0 | 1 | 1 |
| 238 | 1 | 1 | 0 | 0 | 1 | 0 | 0 | 0 | 0 | 1 | 1 |
| 233 | 1 | 1 | 1 | 1 | 1 | 1 | 1 | 1 | 1 | 1 | 1 |
| 232 | 1 | 1 | 0 | 0 | 1 | 1 | 0 | 0 | 0 | 1 | 1 |
| 235 | 1 | 1 | 0 | 0 | 1 | 0 | 0 | 0 | 0 | 1 | 1 |
| 237 | 1 | 1 | 0 | 0 | 1 | 1 | 1 | 1 | 1 | 1 | 1 |
| 407 | 1 | 1 | 1 | 1 | 1 | 1 | 1 | 1 | 1 | 1 | 1 |
| 406 | 1 | 1 | 1 | 1 | 1 | 1 | 1 | 1 | 1 | 1 | 1 |
| 244 | 1 | 1 | 1 | 1 | 1 | 1 | 1 | 1 | 1 | 1 | 1 |
| VC | 1 | 1 | | | | | | | | | |
| WT | | | | | | | | | | | |

¹presence of a gene of interest is denoted by 1 and absence is denoted by 0.

TABLE 18
MULTIPLEX PCR results of Sb10 sorghum events selected for GC analysis¹

| Event ID | adh1 | nptii | sc_aact | sc_hmgs | sc_hmgr | sc_mk | sc_pmk | sc_mpd | sc_ippi | sc_fpps | aa_bfs |
|---|---|---|---|---|---|---|---|---|---|---|---|
| 418 | 1 | 1 | 1 | 1 | 1 | 1 | 1 | 1 | 1 | 1 | 1 |
| 415 | 1 | 1 | 0 | 1 | 1 | 1 | 0 | 0 | 0 | 1 | 1 |
| WT | | | | | | | | | | | |

¹presence of a gene of interest is denoted by 1 and absence is denoted by 0.

### Example 10

### Analysis of Sorghum Transgenic Events for Farnesene and Caryophyllene Production

[0299] Terpene profile of transgenic plants containing the entire MVA metabolon and genes necessary for farnesene production (FPPS and FS) were conducted using GC or GC-MS. The key sesquiterpenes farnesene and caryophyllene were quantitated in transgenic events with or without methyl jasmonate induction and compared to controls. The results from various constitutive or tissue preferred promoters are shown in Tables 19-21.

[0300] In Sb4b experiment (Table 19), transgenic events 401, 402 and 403 showed 2-3 fold increase in farnesene and caryophyllene content after 4 mM Methyl Jasmonate induction as compared to wild type plants. Increase in farnesene and caryophyllene content (2-4 fold) was also noticed in some transgenic events (402 and 401) without MeJ induction, although at a relatively low level.

[0301] In Sb6 experiment (Table 20), transgenic events 242, 236, 238 and 233 showed 2-3 fold increase in farnesene and caryophyllene content after 4 mM Methyl Jasmonate induction as compared to wild type plants. Substantial increase (85 fold) in farnesene content was also noticed in some transgenic events (242 and 236) without MeJ induction, as compared to the control. However, the total fresh weight of farnesene per gm in non-induced tissues is relatively low level as compared to methyl jasmonate induced tissues.

[0302] In Sb10 experiment (Table 21), transgenic event 418 that contained all genes of interest showed 4 fold increase in farnesene while there is no major difference in caryophyllene content after 4 mM Methyl Jasmonate induction as compared to wild type plants.

TABLE 19
Farnesene and caryophyllene content in leaves
of Sb4 transgenic sorghum events

| | Methyl Jasmonate induced | | | | Non Induced | | | |
|---|---|---|---|---|---|---|---|---|
| | Caryophyllene | | Farnesene | | Caryophyllene | | Farnesene | |
| | (μg/g | | (μg/g | | (μg/g | | (μg/g | |
| Event ID | leaf) | STDEVP | leaf) | STDEVP | leaf) | STDEVP | leaf) | STDEVP |
| 402 | 15.80 | 3.40 | 10.60 | 0.59 | 4.10 | 1.39 | 0.95 | 0.30 |
| 403 | 16.80 | 6.13 | 10.84 | 1.23 | 2.77 | 1.35 | 0.13 | 0.18 |
| 401 | 9.77 | 3.42 | 7.52 | 0.92 | 4.77 | 1.65 | 0.88 | 0.09 |
| 248 | 5.90 | 2.75 | 0.22 | 0.22 | 3.53 | 3.33 | 1.34 | 0.99 |
| 251 | 3.9 | 0 | 2.9 | 0 | 1.9 | 0.00 | 0.2 | 0.00 |
| Control | 3.40 | 0.79 | 4.10 | 0.78 | 0.73 | 0.54 | 0.37 | 0.33 |

TABLE 20
Farnesene and caryophyllene content in leaves of
Sb6 transgenic sorghum events

| | Methyl Jasmonate (Induced) | | | | Non Induced | | | |
|---|---|---|---|---|---|---|---|---|
| | Caryophyllene | | Farnesene | | Caryophyllene | | Farnesene | |
| | (μg/g | | (μg/g | | (μg/g | | (μg/g | |
| Event ID | leaf) | STDEVP | leaf) | STDEVP | leaf) | STDEVP | leaf) | STDEVP |
| 242 | 11.00 | 1.31 | 10.93 | 4.34 | 0.00 | 0.00 | 1.90 | 1.10 |
| 236 | 6.90 | 1.61 | 10.73 | 3.86 | 0.00 | 0.00 | 1.85 | 0.45 |
| 238 | 11.80 | 4.00 | 9.00 | 3.30 | 0.37 | 0.64 | 0.10 | 0.14 |
| 233 | 4.40 | 1.20 | 8.15 | 3.15 | 0.00 | 0.00 | 0.50 | 0.50 |
| 232 | 6.25 | 1.55 | 6.80 | 1.80 | 0.00 | 0.00 | 0.00 | 0.00 |
| 235 | 4.03 | 1.59 | 5.17 | 0.41 | 0.00 | 0.00 | 0.00 | 0.00 |
| 237 | 2.30 | 0.90 | 4.83 | 2.35 | 0.00 | 0.00 | 0.00 | 0.00 |
| 407 | 8.47 | 2.28 | 3.57 | 0.37 | 3.00 | 0.16 | 0.23 | 0.17 |
| 406 | 6.17 | 1.30 | 3.50 | 0.98 | 2.87 | 0.95 | 0.17 | 0.24 |
| 244 | 8.50 | 2.20 | 1.85 | 0.35 | 0.00 | 0.00 | 0.00 | 0.00 |
| Control | 3.73 | 2.49 | 4.38 | 1.98 | 0.40 | 0.69 | 0.02 | 0.06 |

TABLE 21
Farnesene and caryophyllene content in leaves of
Sb10 transgenic sorghum events

| | Methyl Jasmonate (induced) | | | | Non induced | | | |
|---|---|---|---|---|---|---|---|---|
| | Caryophyllene | | Farnesene | | Caryophyllene | | Farnesene | |
| | (μg/g | | (μg/g | | (μg/g | | (μg/g | |
| Event ID | leaf) | STDEVP | leaf) | STDEVP | leaf) | STDEVP | leaf) | STDEVP |
| 418 | 1.42 | 1.39 | 12.70 | 3.40 | 0.00 | 0.00 | 1.70 | 0.29 |
| 415 | 8.53 | 3.43 | 6.20 | 1.30 | 0.57 | 0.49 | 0.17 | 0.24 |
| WT | 2.35 | 1.32 | 3.55 | 0.28 | 0.55 | 0.62 | 0.08 | 0.12 |

[0303] RT-PCR analysis of events that produced higher levels of farnesene showed that the key rate limiting genes FPPS and FS were expressed in some of the events (FIG. 8). In event 233 that contained all genes of the MVA metabolon, except for HMGR the rest of the genes were expressed. However, the higher rate of farnesene content did not correlate to increased transgene expression as in the case of Sb7 (FIG. 5).

### Example 11

### Analysis of Sugarcane Transgenic Events by Multi-PLEX PCR to Determine the Presence or Absence of Genes Comprising the MVA Metabolon

[0304] Multi-PLEX PCR analysis using gene specific primers was developed to determine the presence or absence of genes for selectable marker NPTII, endogenous gene ADH1 as internal control, genes comprising the entire MVA metabolon (7 genes; AACT, HMGS, HMGR, MK, PMK, MPD and IPPI) and FPPS and FS. The results of the multiplex PCR analysis of sugarcane events selected for GC analysis from So4b, So6 and So10 experiments are shown in Table 22. In Sb4b experiment, transgenic events 402, 403, 248 and 251 contained all genes of interest while the event 401 was missing few of the MVA pathway genes and hence do not represent the entire MVA metabolon. In Sb6 experiment, events 233, 244, 406 and 407 contained all genes of interest while some of the other events were missing few of the MVA pathway genes and hence do not represent the entire MVA metabolon. In Sb10 experiment, transgenic event 418 contained all genes of interest while the event 415 was missing few of the MVA pathway genes and hence do not represent the entire MVA metabolon.

TABLE 22
MxPCR results of So11b sugarcane events selected for GC analysis¹

| Event | | | | | | | | | | | |
|---|---|---|---|---|---|---|---|---|---|---|---|
| ID | adh1 | nptii | Sc_aact | Sc_hmgs | Sc_hmgr | Sc_mk | Sc_pmk | Sc_mpd | Sc_ippi | Sc_fpps | Aa_bfs |
| 546 | 1 | 1 | 1 | 1 | 1 | 1 | 1 | 0 | 1 | 1 | 1 |
| 548 | 1 | 1 | 1 | 1 | 1 | 1 | 1 | 1 | 1 | 1 | 1 |
| 572 | 1 | 1 | 1 | 1 | 1 | 1 | 1 | 1 | 1 | 1 | 1 |
| VC | 1 | 1 | 0 | 0 | 0 | 0 | 0 | 0 | 0 | 0 | 0 |

¹presence of a gene of interest is denoted by 1 and absence is denoted by 0.

### Example 12

### Analysis of Sugarcane Transgenic Events for Farnesene and Caryophyllene Production

[0305] Terpene profile of transgenic plants containing the entire MVA metabolon and genes necessary for farnesene production (FPPS and FS) were conducted using GC or GC-MS. The key sesquiterpenes farnesene and caryophyllene were quantitated in transgenic events with or without methyl jasmonate induction and compared to controls. The results from So11b experiment is shown in Table 23. Transgenic events showed 5-9 fold increase in farnesene and caryophyllene content after 4 mM Methyl Jasmonate induction as compared to control plants. Increase in farnesene and caryophyllene content (2-9 fold) was also noticed in transgenic events (572 and 548) without Methyl Jasmonate induction, although at a relatively low level as compared tissues induced by Methyl Jasmonate.

TABLE 23
Farnesene and caryophyllene content in leaves of So11b transgenic sugarcane events

| | Methyl Jasmonate Induced | | | | Non-Induced | | | |
|---|---|---|---|---|---|---|---|---|
| | | | Farnesene | | Caryophyllene | | Farnesene | |
| Event | Caryophyllene | | (μg/g | | (μg/g | | (μg/g | |
| ID | (μg/g leaf) | STDEVP | leaf) | STDEVP | leaf) | STDEVP | leaf) | STDEVP |
| 546 | 9.70 | 1.00 | 4.95 | 0.05 | 0.57 | 0.49 | 0.17 | 0.24 |
| 548 | 10.05 | 4.95 | 7.05 | 1.45 | 0.00 | 0.00 | 2.80 | 3.28 |
| 572 | 11.67 | 0.91 | 8.57 | 1.53 | 0.00 | 0.00 | 0.70 | 0.29 |
| Control | 1.40 | 1.40 | 0.95 | 0.55 | 1.95 | 0.45 | 0.30 | 0.00 |

### LITERATURE CITATIONS

[0306] Ananda, N., and P. V. Vadlani. 2010a. Fiber Reduction and Lipid Enrichment in Carotenoid-Enriched Distillers Dried Grain with Solubles Produced by Secondary Fermentation of Phaffia rhodozyma and Sporobolomyces roseus. Journal of Agricultural and Food Chemistry. 58:12744-12748.
[0307] Ananda, N., and P. V. Vadlani. 2010b. Production and optimization of carotenoid-enriched dried distiller's grains with solubles by Phaffia rhodozyma and Sporobolomyces roseus fermentation of whole stillage. Journal of industrial microbiology & biotechnology. 37:1183-1192.
[0308] Aoyama, T., and N. H. Chua. 1997. A glucocorticoid-mediated transcriptional induction system in transgenic plants. Plant J. 11:605-612.
[0309] Arce, A., M. J. Earle, H. Rodriguez, K. R. Seddon, and A. Soto. 2008. 1-Ethyl-3-methylimidazolium bis{(trifluoromethyl)sulfonyl}amide as solvent for the separation of aromatic and aliphatic hydrocarbons by liquid extraction—extension to C-7- and C-8-fractions. Green Chemistry. 10:1294-1300.
[0310] Arce, A., A. Pobudkowska, O. Rodriguez, and A. Soto. 2007. Citrus essential oil terpenless by extraction using 1-ethyl-3-methylimidazolium ethylsulfate ionic liquid: Effect of the temperature. Chemical Engineering Journal. 133:213-218.
[0311] Ausubel, F. M. 1987. Current protocols in molecular biology. Greene Publishing Associates;
[0312] J. Wiley, order fulfillment, Brooklyn, N. Y.
[0313] Media, Pa. 2 v. (loose-leaf) pp.
[0314] Bach, T. J., A. Boronat, C. Caelles, A. Ferrer, T. Weber, and A. Wettstein. 1991. Aspects Related to Mevalonate Biosynthesis in Plants. Lipids. 26:637-648.
[0315] Bell-Lelong, D. A., J. C. Cusumano, K. Meyer, and C. Chapple. 1997. Cinnamate-4-Hydroxylase Expression in Arabidopsis (Regulation in Response to Development and the Environment). Plant Physiology. 113:729-738.
[0316] Board, N. B. 2011. BioDiesel.
[0317] Bohlmann, J., and C. I. Keeling. 2008. Terpenoid biomaterials. Plant J. 54:656-669.
[0318] Bohlmann, J., Meyer-Gauen, G., Croteau, R. 1998. Plant terpenoid synthases: molecular biology and phylogenetic analysis. Proceedings of the National Academy of Sciences of the United States of America. 95:4126-4133.
[0319] Brijwani, K., H. S. Oberoi, and P. V. Vadlani. 2010. Production of a cellulolytic enzyme system in mixed-culture solid-state fermentation of soybean hulls supplemented with wheat bran. Process Biochemistry. 45:120-128.
[0320] Callis, J., M. Fromm, and V. Walbot. 1987. Introns increase gene expression in cultured maize cells. Genes Dev. 1:1183-1200.
[0321] Cheng, A. X., Y. G. Lou, Y. B. Mao, S. Lu, L. J. Wang, and X. Y. Chen. 2007. Plant terpenoids: Biosynthesis and ecological functions. J Integr Plant Biol. 49:179-186.
[0322] Coffelt, T. A., F. S. Nakayama, D. T. Ray, K. Cornish, and C. M. McMahan. 2009. Post-harvest storage effects on guayule latex, rubber, and resin contents and yields. Industrial Crops and Products. 29:326-335.
[0323] Cornish, K., M. H. Chapman, J. L. Brichta, and D. J. Scott. 2000a. Effect of postharvest conditions on the yield of hypoallergenic latex from guayule (Parthenium argentatum Gray). Abstr Pap Am Chem S. 219:U191-U191.
[0324] Cornish, K., M. H. Chapman, J. L. Brichta, S. H. Vinyard, and F. S. Nakayama. 2000b. Post-harvest stability of latex in different sizes of guayule branches. Industrial Crops and Products. 12:25-32.
[0325] Cornish, K., Myers, M. D. and Kelley, S. S.. 2004. Quantification of rubber latex in homogenate and purified samples using near infrared spectroscopy. Industrial Crops and Products 19:283-296.
[0326] Crock J, W. M., Croteau R. 1997. Isolation and bacterial expression of a sesquiterpene synthase cDNA clone from peppermint (Mentha×piperita, L.) that produces the aphid alarm pheromone (E)-beta-farnesene. Proc Natl Acad Sci USA. 94:12833-12838.
[0327] Cunillera, N., M. Arro, D. Delourme, F. Karst, A. Boronat, and A. Ferrer. 1996. Arabidopsis thaliana contains two differentially expressed farnesyl-diphosphate synthase genes. Journal of Biological Chemistry. 271:7774-7780.
[0328] Demyttenaere, J. C. R., R. M. Morina, N. De Kimpe, and P. Sandra. 2004. Use of headspace solid-phase microextraction and headspace sorptive extraction for the detection of the volatile metabolites produced by toxigenic Fusarium species. Journal of Chromatography a. 1027:147-154.
[0329] Dunwell, J. M. 1999. Transformation of maize using silicon carbide whiskers. Methods in molecular biology (Clifton, N. J. 111:375-382.
[0330] Edris, A. E., R. Chizzola, and C. Franz. 2008. Isolation and characterization of the volatile aroma compounds from the concrete headspace and the absolute of Jasminum sambac (L.) Ait. (Oleaceae) flowers grown in Egypt. European Food Research and Technology. 226:621-626.
[0331] Enjuto, M., L. Balcells, N. Campos, C. Caelles, M. Arro, and A. Boronat. 1994. Arabidopsis-Thaliana Contains 2 Differentially Expressed 3-Hydroxy-3-Methylglutaryl-Coa Reductase Genes, Which Encode Microsomal Forms of the Enzyme. Proceedings of the National Academy of Sciences of the United States of America. 91:927-931.
[0332] Estevez, J. M., A. Cantero, C. Romero, H. Kawaide, L. F. Jimenez, T. Kuzuyama, H. Seto, Y. Kamiya, and P. Leon. 2000. Analysis of the expression of CLA1, a gene that encodes the 1-deoxyxylulose 5-phosphate synthase of the 2-C-methyl-D-erythritol-4-phosphate pathway in Arabidopsis. Plant Physiology. 124:95-103.
[0333] Fischer, C. R., D. Klein-Marcuschamer, and G. Stephanopoulos. 2008. Selection and optimization of microbial hosts for biofuels production. Metabolic Engineering. 10:295-304.
[0334] Gounder, R., and E. Iglesia. 2011. Catalytic Alkylation Routes via Carbonium-Ion-Like Transition States on Acidic Zeolites. Chem Cat Chem. 3:1134-1138.
[0335] Greenhagen, B. T., P. E. O'Maille, J. P. Noel, and J. Chappell. 2006. Identifying and manipulating structural determinates linking catalytic specificities in terpene synthases. Proceedings of the National Academy of Sciences. 103:9826-9831.
[0336] Hernanz, D., V. Gallo, A. F. Recamales, A. J. Melendez-Martinez, and F. J. Heredia. 2008. Comparison of the effectiveness of solid-phase and ultrasound-mediated liquid-liquid extractions to determine the volatile compounds of wine. Talanta. 76:929-935.
[0337] Huber D P, P. R., Godard K A, Sturrock R N, Bohlmann J. 2005. Characterization of four terpene synthase cDNAs from methyl jasmonate-induced Douglas-fir, Pseudotsuga menziesii. Phytochemistry. 66:1427-1439.
[0338] Knapik, A., A. Drelinkiewicz, A. Waksmundzka-Gora, A. Bukowska, W. Bukowski, and J. Noworol. 2008. Hydrogenation of 2-Butyn-1,4-diol in the Presence of Functional Crosslinked Resin Supported Pd Catalyst. The Role of Polymer Properties in Activity/Selectivity Pattern. Catalysis Letters. 122:155-166.
[0339] Kollner, T. G., J. Gershenzon, and J. Degenhardt. 2009. Molecular and biochemical evolution of maize terpene synthase 10, an enzyme of indirect defense. Phytochemistry. 70:1139-1145.
[0340] Lai, S. M., I. W. Chen, and M. J. Tsai. 2005. Preparative isolation of terpene trilactones from Ginkgo biloba leaves. Journal of Chromatography a. 1092:125-134.
[0341] LEWINSOHN, E., N. DUDAI, Y. TADMOR, I. KATZIR, U. RAVID, E. PUTIEVSKY, and D. M. JOEL. 1998. Histochemical Localization of Citral Accumulation in Lemongrass Leaves (Cymbopogon citratus (DC.) Stapf., Poaceae). Annals of Botany. 81:35-39.
[0342] Liang, X. W., M. Dron, C. L. Cramer, R. A. Dixon, and C. J. Lamb. 1989. Differential regulation of phenylalanine ammonia-lyase genes during plant development and by environmental cues. Journal of Biological Chemistry. 264:14486-14492.
[0343] Lin, Y., and S. Tanaka. 2006. Ethanol fermentation from biomass resources: current state and prospects. Appl Microbiol Biotechnol. 69:627-642.
[0344] Maruyama T, I. M., Honda G. 2001. Molecular cloning, functional expression and characterization of (E)-beta farnesene synthase from Citrus junos. Biol Pharm Bull. 10:1171-1175.
[0345] Maury, S., P. Geoffroy, and M. Legrand. 1999. Tobacco O-Methyltransferases Involved in Phenylpropanoid Metabolism. The Different Caffeoyl-Coenzyme A/5-Hydroxyferuloyl-Coenzyme A 3/5-O-Methyltransferase and Caffeic Acid/5-Hydroxyferulic Acid 3/5-O-Methyltransferase Classes Have Distinct Substrate Specificities and Expression Patterns. Plant Physiology. 121:215-224.
[0346] McMahan, C. M., K. Cornish, T. A. Coffelt, F. S. Nakayama, R. G. McCoy, J. L. Brichta, and D. T. Ray. 2006. Post-harvest storage effects on guayule latex quality from agronomic trials. Industrial Crops and Products. 24:321-328.
[0347] Mookdasanit, J., H. Tamura, T. Yoshizawa, T. Tokunaga, and K. Nakanishi. 2003. Trace volatile components in essential oil of Citrus sudachi by means of modified solvent extraction method. Food Science and Technology Research. 9:54-61.
[0348] Nair, R. B., Q. Xia, C. J. Kartha, E. Kurylo, R. N. Hirji, R. Datla, and G. Selvaraj. 2002. Arabidopsis CYP98A3 Mediating Aromatic 3-Hydroxylation. Developmental Regulation of the Gene, and Expression in Yeast. Plant Physiology. 130:210-220.
[0349] Newell, R. 2011. Annual Energy Outlook 2011, Reference Case.
[0350] Nigam, P. S., and A. Singh. 2011. Production of liquid biofuels from renewable resources. Progress in Energy and Combustion Science. 37:52-68.
[0351] Oberoi, H. S., P. V. Vadlani, R. L. Madl, L. Saida, and J. P. Abeykoon. 2010. Ethanol Production from Orange Peels: Two-Stage Hydrolysis and Fermentation Studies Using Optimized Parameters through Experimental Design. Journal of Agricultural and Food Chemistry. 58:3422-3429.
[0352] Pechous, S. W., C. B. Watkins, and B. D. Whitaker. 2005. Expression of alpha-farnesene synthase gene AFS1 in relation to levels of alpha-farnesene and conjugated trienols in peel tissue of scald-susceptible ‘Law Rome’ and scald-resistant ‘Idared’ apple fruit. Postharvest Biology and Technology. 35:125-132.
[0353] Peralta-Yahya, P., and J. Keasling. 2010. Advanced biofuel production in microbes. Biotechnol J. 5:147-162.
[0354] Petrasovits, L. A. P., M. P.; Nielsen, L. K.; Brumbley, S. M. 2007. Production of polyhydroxybutyrate in sugar cane. Plant Biotechnology Journal. 5:162-172.
[0355] Picaud S, B. M., Brodelius P E. 2005. Expression, purification and characterization of recombinant (E)-beta-farnesene synthase from Artemisia annua. Phytochemistry. 66:961-967.
[0356] Pourbafrani, M., G. Forgacs, I. S. Horvath, C. Niklasson, and M. J. Taherzadeh. 2010. Production of biofuels, limonene and pectin from citrus wastes. Bioresour Technol. 101:4246-4250.
[0357] R F A. 2011. Renewable Fuels Association—ethanol facts.
[0358] Rout, P. K., S. N. Naika, and Y. R. Rao. 2008. Subcritical CO2 extraction of floral fragrance from Quisqualis indica. Journal of Supercritical Fluids. 45:200-205.
[0359] Schnee, C., T. G. Kollner, M. Held, T. C. J. Turlings, J. Gershenzon, and J. Degenhardt. 2006. The products of a single maize sesquiterpene synthase form a volatile defense signal that attracts natural enemies of maize herbivores. Proceedings of the National Academy of Sciences of the United States of America. 103:1129-1134.
[0360] Serrano, A., and M. Gallego. 2006. Continuous microwave-assisted extraction coupled on-line with liquid-liquid extraction: Determination of aliphatic hydrocarbons in soil and sediments. Journal of Chromatography a. 1104:323-330.
[0361] Tholl, D. 2006. Terpene synthases and the regulation, diversity and biological roles of terpene metabolism. Current Opinion in Plant Biology. 9:1-8.
[0362] Unger, E. A., J. M. Hand, A. R. Cashmore, and A. C. Vasconcelos. 1989. Isolation of a cDNA encoding mitochondrial citrate synthase from Arabidopsis thaliana. Plant Mol Biol. 13:411-418.
[0363] Van den Broeck, G., Timko, M. P., Kausch, A. P., Cashmore, A. R., Van Montagu, M, Herrera-Estrella, L. 1985. Targeting of a foreign peptide to chloroplasts by fusion to the transit peptide from the small subunit of ribulose 1,5-bisphosphate carboxylase. Nature. 313:358-363.
[0364] von Heijne, G., Steppuhn, J., Herrmann, R. G. 1989. Domain structure of mitochondrial and chloroplast targeting peptides. European Journal of Biochemistry. 180:535-545.
[0365] Wienk, H. L. J., Wechselberger, R. W., Czisch, M., de Kruijff, B. 2000. Structure, Dynamics, and Insertion of a Chloroplast Targeting Peptide in Mixed Micelles. Biochemistry. 39:8219-8227.
[0366] Wu, S., M. Schalk, A. Clark, R. B. Miles, R. Coates, and J. Chappell. 2006. Redirection of cytosolic or plastidic isoprenoid precursors elevates terpene production in plants. Nat Biotechnol. 24:1441-1447.
[0367] Yoshikuni, Y., and B.w.t.U.o.C. University of California, San Francisco. 2007. Redesigning enzymes based on the theories of molecular evolution for optimal function in synthetic metabolic pathways. University of California, Berkeley with the University of California, San Francisco.
[0368] Zhan, X., D. Wang, M. R. Tuinstra, S. Bean, P. A. Seib, and X. S. Sun. 2003. Ethanol and lactic acid production as affected by sorghum genotype and location. Industrial Crops and Products. 18:245-255.
[0369] Zhang, J., X.-Z. Sun, M. Poliakoff, and M. W. George. 2003. Study of the reaction of Rh(acac)(CO)2 with alkenes in polyethylene films under high-pressure hydrogen and the Rh-catalysed hydrogenation of alkenes. Journal of Organometallic Chemistry. 678:128-133.
[0370] Zheng, C. H., T. H. Kim, K. H. Kim, Y. H. Leem, and H. J. Lee. 2004. Characterization of potent aroma compounds in Chrysanthemum coronarium L. (Garland) using aroma extract dilution analysis. Flavour and Fragrance Journal. 19:401-405.
[0371] Zini, C. A., K. D. Zanin, E. Christensen, E. B. Caramao, and J. Pawliszyn. 2003. Solid-phase microextraction of volatile compounds from the chopped leaves of three species of Eucalyptus. Journal of Agricultural and Food Chemistry. 51:2679-2686.

The application's sequence listing, which the Patent Office published only in electronic form, follows.

SEQUENCE LISTING (192 sequences)

SEQ ID NO: 1 - protein, 394 aa, Escherichia coli
MKNCVIVSAVRTAIGSFNGSLASTSAIDLGATVIKAAIERAKIDSQHVDEVIMGNVLQAGLGQNPARQALLKSGLAETVCGFTVNKVCGSGLKSVALAAQAIQAGQAQSIVAGGMENMSLAPYLLDAKARSGYRLGDGQVYDVILRDGLMCATHGYHMGITAENVAKEYGITREMQDELALHSQRKAAAAIESGAFTAEIVPVNVVTRKKTFVFSQDEFPKANSTAEALGALRPAFDKAGTVTAGNASGINDGAAALVIMEESAALAAGLTPLARIKSYASGGVPPALMGMGPVPATQKALQLAGLQLADIDLIEANEAFAAQFLAVGKNLGFDSEKVNVNGGAIALGHPIGASGARILVTLLHAMQARDKTLGLATLCIGGGQGIAMVIERLN

SEQ ID NO: 2 - protein, 394 aa, Escherichia coli; identical to SEQ ID NO: 1

SEQ ID NO: 3 - protein, 398 aa, Saccharomyces cerevisiae
MSQNVYIVSTARTPIGSFQGSLSSKTAVELGAVALKGALAKVPELDASKDFDEIIFGNVLSANLGQAPARQVALAAGLSNHIVASTVNKVCASAMKAIILGAQSIKCGNADVVVAGGCESMTNAPYYMPAARAGAKFGQTVLVDGVERDGLNDAYDGLAMGVHAEKCARDWDITREQQDNFAIESYQKSQKSQKEGKFDNEIVPVTIKGFRGKPDTQVTKDEEPARLHVEKLRSARTVFQKENGTVTAANASPINDGAAAVILVSEKVLKEKNLKPLAIIKGWGEAAHQPADFTWAPSLAVPKALKHAGIEDINSVDYFEFNEAFSVVGLVNTKILKLDPSKVNVYGGAVALGHPLGCSGARVVVTLLSILQQEGGKIGVAAICNGGGGASSIVIEKI

SEQ ID NO: 4 - protein, 404 aa, Hevea brasiliensis
MAPVAAAEIKPRDVCIVGVARTPMGGFLGLLSTLPATKLGSIAIEAALKRASVDPSLVQEVFFGNVLSANLGQAPARQAALGAGIPNSVVCTTVNKVCASGMKATMLAAQSIQLGINDVVVAGGMESMSNAPKYLAEARKGSRLGHDSLVDGMLKDGLWDVYNDVGMGSCAEICADNHSITREDQDKFAIHSFERGIAAQESGAFAWEIVPVEVSGGRGKPLTIVDKDEGLGKFDPVKLRKLRPSFKENGGTVTAGNASSISDGAAALILVSGETALKLGLQVIAKIRGYADAAQAPELFTTAPALAIPKTIANAGLDASQVDYYEINEAFAVVALANQKLLGLNPEKVNVHGGAVSLGHPLGCSGARILVTLLGVLRKKNAKYGVGGVCNGGGGASALVVELL

SEQ ID NO: 5 - protein, 388 aa, Staphylococcus aureus
MTIGIDKINFYVPKYYVDMAKLAEARQVDPNKFLIGIGQTEMAVSPVNQDIVSMGANAAKDIITDEDKKKIGMVIVATESAVDAAKAAAVQIHNLLGIQPFARCFEMKEACYAATPAIQLAKDYLATRPNEKVLVIATDTARYGLNSGGEPTQGAGAVAMVIAHNPSILALNEDAVAYTEDVYDFWRPTGHKYPLVDGALSKDAYIRSFQQSWNEYAKRQGKSLADFASLCFHVPFTKMGKKALESIIDNADETTQERLRSGYEDAVDYNRYVGNIYTGSLYLSLISLLENRDLQAGETIGLFSYGSGSVGEFYSATLVEGYKDHLDQAAHKALLNNRTEVSVDAYETFFKRFDDVEFDEEQDAVHEDRHIFYLSNIENNVREYHRPE

SEQ ID NO: 6 - protein, 388 aa, Staphylococcus aureus; identical to SEQ ID NO: 5

SEQ ID NO: 7 - protein, 491 aa, Saccharomyces cerevisiae
MKLSTKLCWCGIKGRLRPQKQQQLHNTNLQMTELKKQKTAEQKTRPQNVGIKGIQIYIPTQCVNQSELEKFDGVSQGKYTIGLGQTNMSFVNDREDIYSMSLTVLSKLIKSYNIDTNKIGRLEVGTETLIDKSKSVKSVLMQLFGENTDVEGIDTLNACYGGTNALFNSLNWIESNAWDGRDAIVVCGDIAIYDKGAARPTGGAGTVAMWIGPDAPIVFDSVRASYMEHAYDFYKPDFTSEYPYVDGHFSLTCYVKALDQVYKSYSKKAISKGLVSDPAGSDALNVLKYFDYNVFHVPTCKLVTKSYGRLLYNDFRANPQLFPEVDAELATRDYDESLTDKNIEKTFVNVAKPFHKERVAQSLIVPTNTGNMYTASVYAAFASLLNYVGSDDLQGKRVGLFSYGSGLAASLYSCKIVGDVQHIIKELDITNKLAKRITETPKDYEAAIELRENAHLKKNFKPQGSIEHLQSGVYYLTNIDDKFRRSYDVKK

SEQ ID NO: 8 - protein, 464 aa, Hevea brasiliensis
MAKNVGILAVDIYFPPTFVQQEALEAHDGASKGKYTIGLGQDCMAFCTEVEDVISMSLTAVTSLLDKYNIDPKQIGRLEVGSETVIDKSKSIKTFLMQIFEKFGNTDIEGVDSTNACYGGTAALFNCVNWVESSSWDGRYGLVVCTDSAVYAEGPARPTGGAAAIAILVGPDAPIAFESKFRGSHMSHAYDFYKPNLASEYPVVDGKLSQTCYLMALDSCYKHFCAKYEKFEGKQFSISDAEYFVFHSPYNKLVQKSFARLVFNDFVRNASSIDETAKEKLAPFSNLSGDESYQNRDLEKVSQQVAKPLYDAKVKPTTLIPKQVGNMYTASLYAAFASLLHSKHTELAGKRVTLFSYGSGLTATMFSLRLHEGQHPFSLSNIASVMNVAGKLKARHELPPEKFVDIMKLMEHRYGAKDFVTSKDCSLLASGTYYLTEVDSLYRRFYAQKAVGNTVENGLLANGH

SEQ ID NO: 9 - protein, 464 aa, Hevea brasiliensis
MAKNVGILAMDIYFPPTYVQQEALEAHDGASKGKYTIGLGQDCMAFCTEVEDVISMSLTAVTSLLEKYNIDPNQIGRLEVGSETVIDKSKSIKTFLMQIFEKFGNTDIEGVDSANACYGGTAALFNCVNWVESNSWDGRYGLVVCTDSAVYAEGPARPTGGAAAIAMLIGPEAPIAFESKFRGSHMSHAYDFYKPNLASEYPVVDGKLSQTCYLMALDSCYKHFCAKYEKLEGKQFSISDAEYFVFHSPYNKLVQKSFARLVFNDFVRNASSIDDAAKEKLAPFSTLSGDESYQNRDLEKVSQQVAKPLYDAKVQPTTLIPKQVGNMYTASLYAAFASLLHNKHTELAGKRVILFSYGSGLTATMFSLRLHEGQHPFSLSNIATVMNVAGKLKTRHEFPPEKFAVIMKLMEHRYGAKDFVTSKDCSILAPGTYYLTEVDTMYRRFYAQKAVGDTVENGLLANGH

SEQ ID NO: 10 - protein, 502 aa, Saccharomyces cerevisiae
MVLTNKTVISGSKVKSLSSAQSSSSGPSSSSEEDDSRDIESLDKKIRPLEELEALLSSGNTKQLKNKEVAALVIHGKLPLYALEKKLGDTTRAVAVRRKALSILAEAPVLASDRLPYKNYDYDRVFGACCENVIGYMPLPVGVIGPLVIDGTSYHIPMATTEGCLVASAMRGCKAINAGGGATTVLTKDGMTRGPVVRFPTLKRSGACKIWLDSEEGQNAIKKAFNSTSRFARLQHIQTCLAGDLLFMRFRTTTGDAMGMNMISKGVEYSLKQMVEEYGWEDMEVVSVSGNYCTDKKPAAINWIEGRGKSVVAEATIPGDVVRKVLKSDVSALVELNIAKNLVGSAMAGSVGGFNAHAANLVTAVFLALGQDPAQNVESSNCITLMKEVDGDLRISVSMPSIEVGTIGGGTVLEPQGAMLDLLGVRGPHATAPGTNARQLARIVACAVLAGELSLCAALAAGHLVQSHMTHNRKPAEPTKPNNLDATDINRLKDGSVTCIKS

SEQ ID NO: 11 - protein, 353 aa, Streptomyces sp. KO-3988
MTDTHAIARVPMKWVGPLRISGNVATTETHVPLATYETPLWPSVGRGAKVSMLSERGIAATLVDERMTRSVLVEATDAQTAYTAARAIEARIEELRAVVRTCSRFAELLQVRHEIAGNLLFVRFEFSTGDASGHNMATLASDALLAHLLQTIPGISYGSISGNYCTDKKATAINGILGRGKNVVTELVVEREVVERVLHTTAAKIVELNIRKNLLGTLLAGGIRSANAHYANMLLGFYLATGQDAANIVEGSQGVTLAEDRDGDLYFSCNLPNLIVGTVGNGKGLEFVETNLNRLGCREDRAPGENARRLAVIAAATVLCGELSLLAAQTNPGELMRAHVELERDNTTAEVGV

SEQ ID NO: 12 - protein, 351 aa, Mycobacterium marinum
MTTQQEQLSVHVPLRWVGPIKISGSEGQFSAHAPLATYESPVWPSVGRGAKLSRLTENGIVTTLIDEKMTRSILLIAPDAAVANNTARQLQTEFAELAAVVGQTSRFAELIGMHPQITANLLFIRFEFRTGDASGHNMATLAADHLIAHILTRYPQMEYGSISGNMCCDKKPTAINGILGRGKNVVTEIVIPRDLVEQHLHTSAAAITALNIRKNLIGTLQAGTIRSANAHYANMLLAFYLATGQDAANIIAGSQGVTHAEDRDGDLYFSCTIPNLIVGTVGNGKDLDFVTDNLAQLGCREQRPPGANARRLAVICAATVLCGELSLMAAQTNPGELMRAHTTYERKPSTA

SEQ ID NO: 13 - protein, 424 aa, Microscilla marina
MSYSHKHVKKVLEQIEKVKSIEAYTQQIAPLTQEEIDKLDRKSFNGSATTEGLEARLSFLAEQGVSVDRLTSHSGLESPESLKGNIENFIGMAQVPVGLAGPLLVKGSEAQGDFFVPLATTEGALIASYNRGMKACRLSGGITSVCLIEGVQRSPFFKFDNLGTVGLFIKWVYQRMDKFTEIVESTSRFAKLNDLKANIEGNSVILTFEYLTGDAAGQNMVTICTDKICKYILANFDITPLEWYIEGNYSGDKKATTLSFVNVRGKKVTAEIVIPRFVVDKVLKTTPEKIAQYWQSSTLGVIQSGAIGAQGHVANGLTALFIACGQDVACISESSIGLTRMETNTDGDLYVSVTLPSLIVGTVGGGTSLATQKECLEMLGCAGANKAKKFAEICCAVALAGEISIASAMSADHFTNAHQKLGRK

SEQ ID NO: 14 - protein, 1054 aa, Saccharomyces cerevisiae
MPPLFKGLKQMAKPIAYVSRFSAKRPIHIILFSLIISAFAYLSVIQYYFNGWQLDSNSVFETAPNKDSNTLFQECSHYYRDSSLDGWVSITAHEASELPAPHHYYLLNLNFNSPNETDSIPELANTVFEKDNTKYILQEDLSVSKEISSTDGTKWRLRSDRKSLFDVKTLAYSLYDVFSENVTQADPFDVLIMVTAYLMMFYTIFGLFNDMRKTGSNFWLSASTVVNSASSLFLALYVTQCILGKEVSALTLFEGLPFIVVVVGFKHKIKIAQYALEKFERVGLSKRITTDEIVFESVSEEGGRLIQDHLLCIFAFIGCSMYAHQLKTLTNFCILSAFILIFELILTPTFYSAILALRLEMNVIHRSTIIKQTLEEDGVVPSTARIISKAEKKSVSSFLNLSVVVIIMKLSVILLFVFINFYNFGANWVNDAFNSLYFDKERVSLPDFITSNASENFKEQAIVSVTPLLYYKPIKSYQRIEDMVLLLLRNVSVAIRDRFVSKLVLSALVCSAVINVYLLNAARIHTSYTADQLVKTEVTKKSFTAPVQKASTPVLTNKTVISGSKVKSLSSAQSSSSGPSSSSEEDDSRDIESLDKKIRPLEELEALLSSGNTKQLKNKEVAALVIHGKLPLYALEKKLGDTTRAVAVRRKALSILAEAPVLASDRLPYKNYDYDRVFGACCENVIGYMPLPVGVIGPLVIDGTSYHIPMATTEGCLVASAMRGCKAINAGGGATTVLTKDGMTRGPVVRFPTLKRSGACKIWLDSEEGQNAIKKAFNSTSRFARLQHIQTCLAGDLLFMRFRTTTGDAMGMNMISKGVEYSLKQMVEEYGWEDMEVVSVSGNYCTDKKPAAINWIEGRGKSVVAEATIPGDVVRKVLKSDVSALVELNIAKNLVGSAMAGSVGGFNAHAANLVTAVFLALGQDPAQNVESSNCITLMKEVDGDLRISVSMPSIEVGTIGGGTVLEPQGAMLDLLGVRGPHATAPGTNARQLARIVACAVLAGELSLCAALAAGHLVQSHMTHNRKPAEPTKPNNLDATDINRLKDGSVTCIKS

SEQ ID NO: 15 - protein, 606 aa, Hevea brasiliensis
MDVRRRPTSGKTIHSVKPKSVEDESAQKPSDALPLPLYLINALCFTVFFYVVYFLLSRWREKIRTSTPLHVVALSEIAAIVAFVASFIYLLGFFGIDFVQSLILRPPTDMWAVDDDEEETEEGIVLREDTRKLPCGQALDCSLSAPPLSRAVVSSPKAMDPIVLPSPKPKVFDEIPFPTTTTIPILGDEDEEIIKSVVAGTIPSYSLESKLGDCKRAAAIRREALQRITGKSLSGLPLEGFDYESILGQCCEMPVGYVQIPVGIAGPLLLDGKEYSVPMATTEGCLVASTNRGCKAIHLSGGATSVLLRDGMTRAPVVRFGTAKRAAQLKLYLEDPANFETLSTSFNKSSRFGRLQSIKCAIAGKNLYMRFCCSTGDAMGMNMVSKGVQNVLNFLQNDFPDMDVIGLSGNFCSDKKPAAVNWIEGRGKSVVCEAIIKGDVVKKVLKTNVEALVELNMLKNLTGSAMAGALGGFNAHASNIVTAIYIATGQDPAQNVESSNCITMMEAVNDGQDLHVSVTMPSIEVGTVGGGTQLASQSACLNLLGVKGASKETPGANSRVLASIVAGSVLAAELSLMSAIAAGQLVNSHMKYNRANKEAAVSKPSS

SEQ ID NO: 16 - protein, 586 aa, Hevea brasiliensis
MDEVRRRPPKHIVRKDHDGEVLNSFSHGHHLPPLKPSDYSLPLSLYLANALVFSLFFSVAYFLLHRWREKIRKSTPLHIVTFPEIAALICLVASVIYLLGFFGIGFVHSFSRASTDSWDVEEYDDDNIIIKEDTRPTGACAAPSLDCSLSLPTKIHAPIVSTTTTSTLSDDDEQIIKSVVSGSIPSYSLESKLGNCKRAALIRRETLQRMSGRSLEGLPLDGFDYESILGQCCEMAIGYVQIPVGIAGPLLLDGKEYTVPMATTEGCLVASANRGCKAIYASGGATSVLLRDGMTRAPVVRFPTAKRAADLKFFMEDPDNFDTIAVVFNKSSRFARLQSVQCAIAGKNLYMRFSCSTGDAMGMNMVSKAVQNVIDYLQNDFPDMDVIGLTGNFCADKKAAAVNWIEGRGKSVVCEAIIKEEVVKKVLKTNVAALVELNMIKNLTGSAVAGSLGGFNAHASNMVTAVYIATGQDPAQNVESSHCITMMEAVNDGKDLHISVSMPSIELGTVGGGTQLASQSACLNLLGVKGASKDSPGSNSRLLATIVAGSVLAGELSLMSAIAAGQLVNSHMKYNRSAKDVSKITF

SEQ ID NO: 17 - protein, 425 aa, Staphylococcus aureus
MQSLDKNFRHLSRQQKLQQLVDKQWLSEDQFDILLNHPLIDEEVANSLIENVIAQGALPVGLLPNIIVDDKAYVVPMMVEEPSVVAAASYGAKLVNQTGGFKTVSSERIMIGQIVFDGVDDTEKLSADIKALEKQIHKIADEAYPSIKARGGGYQRIAIDTFPEQQLLSLKVFVDTKDAMGANMLNTILEAITAFLKNESPQSDILMSILSNHATASVVKVQGEIDVKDLARGERTGEEVAKRMERASVLAQVDIHRAATHNKGVMNGIHAVVLATGNDTRGAEASAHAYASRDGQYRGIATWRYDQKRQRLIGTIEVPMTLAIVGGGTKVLPIAKASLELLNVDSAQELGHVVAAVGLAQNFAACRALVSEGIQQGHMSLQYKSLAIVVGAKGDEIAQVAEALKQEPRANTQVAERILQEIRQQ

SEQ ID NO: 18 - protein, 425 aa, Staphylococcus aureus; identical to SEQ ID NO: 17

SEQ ID NO: 19 - protein, 1054 aa, Saccharomyces cerevisiae; identical to SEQ ID NO: 14

SEQ ID NO: 20 - protein, 586 aa, Hevea brasiliensis; identical to SEQ ID NO: 16

SEQ ID NO: 21 - protein, 443 aa, Saccharomyces cerevisiae
MSLPFLTSAPGKVIIFGEHSAVYNKPAVAASVSALRTYLLISESSAPDTIELDFPDISFNHKWSINDFNAITEDQVNSQKLAKAQQATDGLSQELVSLLDPLLAQLSESFHYHAAFCFLYMFVCLCPHAKNIKFSLKSTLPIGAGLGSSASISVSLALAMAYLGGLIGSNDLEKLSENDKHIVNQWAFIGEKCIHGTPSGIDNAVATYGNALLFEKDSHNGTINTNNFKFLDDFPAIPMILTYTRIPRSTKDLVARVRVLVTEKFPEVMKPILDAMGECALQGLEIMTKLSKCKGTDDEAVETNNELYEQLLELIRINHGLLVSIGVSHPGLELIKNLSDDLRIGSTKLTGAGGGGCSLTLLRRDITQEQIDSFKKKLQDDFSYETFETDLGGTGCCLLSAKNLNKDLKIKSLVFQLFENKTTTKQQIDDLLLPGNTNLPWTS

SEQ ID NO: 22 - protein, 313 aa, Anaerolinea thermophila
MTGIFATAPGKIILFGEHAVVYGYPAIAVPVNQVRAKVLILPIPANKPDEVYIEAPDIHLNSHLNQLAFKDPLRIVIEEVQNILRLSYLPPMRIRITSTIPVAAGLGSGAAVSVALARALANYLGHPLPDETICQIAFRAEHSYHGTPSGIDNTVITYNQPLFFQKGKPYELLGVEKPFFIVIGNTGIASPTGEVVAEVRKNREQNPEKYNALFEKIGQIVLYARKLIEHGNVVDLGSMLTENHCLLKEMGVSCKELDILVETAIHAGAYGAKLSGGGKGGNMIALASSEKLPQITQALRDAGATTVITTEIR

SEQ ID NO: 23 - protein, 320 aa, Plesiocystis pacifica
MTLELRSEAEACGKIILLGEHSVVYGHPALAAGLSRGLILRARPLDGRGGAMELSIPAWDLDLRLTADSEHPVARACLEVLAYCDGPVTGWRIEGEAKIPARAGLGSSAALSVALARLALPEADARTVETVVAASMAGERVFHGDPSGIDSEVAARGGVIAFARGEGVEAVRLRSPLHLVVVPSGIPRQTGVLVAGVRARRDRFPQVIEPVLEALGALVVRGRAALEAGDTAALAELIAVAHELLGALGVSRPPLDALAAHAVGEGALGAKLTGAGGGGCLFALCDNPGAAASVISAMAEGFPELAASPRTRAFAVEVEA

SEQ ID NO: 24 - protein, 313 aa, Herpetosiphon aurantiacus
MNSAPGKLILAGEHAVVYGQPALAMPIAALRASVAVEPAPRGAGMTVHAPDLGLVWRLRATAPLSDLAQRTLDYLQLPEPDLRLTISSSIPIASGMGSGAAVGAALVRALAEQAGQQLSAQVISDLVYQSEKAFHGTPSGIDNTVVAYEQPILFQRQTQGEPLIAPLAVGNQWHFVVADSGIASETKAVVGDLRQRWLADPELYNRQFVAVGNLVRQIQTALAGNDAELFGQLLSQNHQLLQTLGVSAEKLDYLVQTALAAGAWGAKMSGAGWGGIMLALVPAERASYIQQQLRAAGAVQTWQTSLLPTDSKR

SEQ ID NO: 25 - protein, 443 aa, Saccharomyces cerevisiae; identical to SEQ ID NO: 21

SEQ ID NO: 26 - protein, 386 aa, Hevea brasiliensis
MEVKARAPGKIILSGEHAVVHGSTAVAASINLYTYVTLSFATAENDDSLKLQLKDLALEFSWPIGRIREALSNLGAPSSSTRTSCSMESIKTISALVEEENIPEAKIALTSGVSAFLWLYTSIQGFKPATVVVTSDLPLGSGLGSSAAFCVALSAALLAFSDSVNVDTKHLGWSIFGESDLELLNKWALEGEKIIHGKPSGIDNTVSAYGNMIKFKSGNLTRIKSNMPLKMLVTNTRVGRNTKALVAGVSERTLRHPNAMSFVFNAVDSISNELANIIQSPAPDDVSITEKEEKLEELMEMNQGLLQCMGVSHASIETVLRTTLKYKLASKLTGAGGGGCVLTLLPTLLSGTVVDKAIAELESCGFQCLIAGIGGNGVEFCFGGSS

SEQ ID NO: 27 - protein, 451 aa, Saccharomyces cerevisiae
MSELRAFSAPGKALLAGGYLVLDPKYEAFVVGLSARMHAVAHPYGSLQESDKFEVRVKSKQFKDGEWLYHISPKTGFIPVSIGGSKNPFIEKVIANVFSYFKPNMDDYCNRNLFVIDIFSDDAYHSQEDSVTEHRGNRRLSFHSHRIEEVPKTGLGSSAGLVTVLTTALASFFVSDLENNVDKYREVIHNLSQVAHCQAQGKIGSGFDVAAAAYGSIRYRRFPPALISNLPDIGSATYGSKLAHLVNEEDWNITIKSNHLPSGLTLWMGDIKNGSETVKLVQKVKNWYDSHMPESLKIYTELDHANSRFMDGLSKLDRLHETHDDYSDQIFESLERNDCTCQKYPEITEVRDAVATIRRSFRKITKESGADIEPPVQTSLLDDCQTLKGVLTCLIPGAGGYDAIAVIAKQDVDLRAQTADDKRFSKVQWLDVTQADWGVRKEKDPETYLDK

SEQ ID NO: 28 - protein, 376 aa, Lactobacillus vaginalis
MRGYVKLITEKAPGKLYIAGEYAVVENGYPAILVALDQFVTCSIEESAAEVGKIISRQYHNNALQWHRLGEQMVVDNRDNPFSYILSAIKVTEEYARSFARELRIFDLHIDSQLDSDSGKKYGLGSSAAVTVATVKALCRFYNLPVTKDEIFKLAAIAHFEVQGNGSLGDVAASVYGGWIAYHSFDRQWLAQQRKYLDLRTLVDLPWPDLKIESLKAPSNLQLLIGWTGKPASTSQLVDKISLFKARQQKEYRQFLEDSKHCIQRMVDGFHNADLESIKNEIRYNRELLKQLGTNSGVHIETPVLNKLCEIAEDFGGAAKTSGAGGGDCGIVAIDRDSNFKLVLKKWAANKIEQLPLSVHFIENVKGEIKHHLIKK

SEQ ID NO: 29 - protein, 377 aa, Lactobacillus antri
MRREIRQLITEKAPGKLYIAGEYAVVENGYPAVLVALDQFVTCTIKESAREMGQIFSQQYHNNQLLWRRMGDQMVVDKRDNPFSYILSAIKVTEEYARQFERELRIYDLQIDSQLDSQNGRKYGLGSSAAVTVATVKALCRFYNLPVSKDEIFKLAAIAHFEVQGNGSLGDVAASVYGGWISYHSFDRQWLAQQRQYLDIKSLVDLPWPDLQIESLHAPKNLQLLIGWTGKPASTSQLVDKISLFKARQQDDYHRFLEESKACIQRMVEGFHQQDLERIKQEIRYNRDLLKQLGTNSGVDIETPVLNRLCQIAEQFGGAAKTSGAGGGDCGIVAIDQNADFNAVLKSWAKNRIEQLPLNVHFIADIKHRVQQHLPLH

SEQ ID NO: 30 - protein, 369 aa, Lactobacillus fermentum
MITAKAPGKLYIAGEYAVVENGYPAILVALNQFVTCTITEAKDEVGQIISRQYHDNSLQWRRRGDQMVVDKRDNPFSYILSAINVTEEFARSLNQRLGIYNIRIDSQLDSQSGKKYGLGSSAAVTVATVKALCEYYQLPVNKEMIFKLSSIAHFDVQGNGSLGDVAASVYGGWIAYRSFDRQWLSEQRHYLDLPALLSLPWPDLKIEPLDAPANLALLIGWTGKPASTSRLVDKISLFKAKQQDEYHRFLDRSKACIHRMIDGFHTGDLDKIKEEIRYNRNLLQELAHRSGVQIETPLLKKLCQIAEEFGGAAKTSGAGGGDCGIVAIDGHADLPAVLDSWAKSRIEHLPLSVYFVNNIRRYTLQVKQR

SEQ ID NO: 31 - protein, 451 aa, Saccharomyces cerevisiae
MSELRAFSAPGKALLAGGYLVLDPKYEAFVVGLSARMHAVAHPYGSLQGSDKFEVRVKSKQFKDGEWLYHISPKTGFIPVSIGGSKNPFIEKVIANVFSYFKPNMDEYCNRNLFVIDIFSDDAYHSQEDSVTEHRGNRRLSFHSHRIEEVPKTGLGSSAGLVTVLTTALASFFVSDLENNVDKYREVIHNLSQVAHCQAQGKIGSGFDVAAAAYGSIRYRRFPPALISNLPDIGSATYGSKLAHLVNEEDWNITIKSNHLPSGLTLWMGDIKNGSETVKLVQKVKNWYDSHMPESLKIYTELDHANSRFMDGLSKLDRLHETHDDYSDQIFESLERNDCTCQKYPEITEVRDAVATIRRSFRKITKESGADIEPPVQTSLLDDCQTLKGVLTCLIPGAGGYDAIAVIAKQDVDLRAQTADDKRFSKVQWLDVTQADWGVRKEKDPETYLDK

SEQ ID NO: 32 - protein, 503 aa, Hevea brasiliensis
MAVVASAPGKVLMTGGYLILERPNAGIVLSTNARFYAIVKPIYDEIKPDSWAWAWTDVKLTSPQLARESLYKLSLKNLALQCVSSSASRNPFVEQAVQFAVAAAHATLDKDKKNVLNKLLLQGLDITILGTNDFYSYRNEIEACGLPLTPESLAALPSFSSITFNVEEANGQNCKPEVAKTGLGSSAAMTTAVVAALLHHLGLVDLSSSCKEKKFSDLDLVHIIAQTAHCIAQGKVGSGFDVSSAVYGSHRYVRFSPEVLSSAQDAGKGIPLQEVISNILKGKWDHERTMFSLPPLMSLLLGEPGTGGSSTPSMVGALKKWQKSDTQKSQETWRKLSEANSALETQFNILSKLAEEHWDAYKCVIDSCSTKNSEKWIEQATEPSREAVVKALLGSRNAMLQIRNYMRQMGEAAGVPIEPESQTRLLDTTMNMDGVLLAGVPGAGGFDAVFAVTLGDSGTNVAKAWSSLNVLALLVREDPNGVLLESGDPRTKEITTAVFAVHI

SEQ ID NO: 33 - protein, 503 aa, Hevea brasiliensis
MAVVASAPGKGVMTGGYLILERPNAGIVLSTNARFYAIVKPMYDEIKPDSWAWAWTDVKLTSPQLARESLYKLSLKNLALQCVSSSASRNPFVEQAVQFAVAAAHATLDKDKNNVLNKLLLQGLDITILGTSDCYSCRNEIEACGLPLTPESLAALPSFSSITFNVEEANGQNCKPEVAKTGLGSSAAMTTAVVAALLHHLGLVDLSSSCKEKKFSDLDLVHIIAQTAHCIAQGKVGSGFDVSSAVYGSHRYVRFSPEVLSSAQDAGKGIPLQEVISNILKGKWDHERTMFSLPPLMSLLLGEPGTGGSSTPSMVGALKKWQKSDTQKSQETWRKLSEANSALETQFNILSKLAEEHWDAYKCVIDSCSTKNSEKWIEQATEPSREAVVKALLGSRNAMLQIRNYMRQMGEAAGVPIEPESQTRLLDTTMNMDGVLLAGVPGAGGFDAVFAVTLGDSGTNVAKAWSSLNVLALLVREDPNGVLLESGDPRTKEITTAVSAVHI

SEQ ID NO: 34 - protein, 396 aa, Saccharomyces cerevisiae
MTVYTASVTAPVNIATLKYWGKRDTKLNLPTNSSISVTLSQDDLRTLTSAATAPEFERDTLWLNGEPHSIDNERTQNCLRDLRQLRKEMESKDASLPTLSQWKLHIVSENNFPTAAGLASSAAGFAALVSAIAKLYQLPQSTSEISRIARKGSGSACRSLFGGYVAWEMGKAEDGHDSMAVQIADSSDWPQMKACVLVVSDIKKDVSSTQGMQLTVATSELFKERIEHVVPKRFEVMRKAIVEKDFATFAKETMMDSNSFHATCLDSFPPIFYMNDTSKRIISWCHTINQFYGETIVAYTFDAGPNAVLYYLAENESKLFAFIYKLFGSVPGWDKKFTTEQLEAFNHQFESSNFTARELDLELQKDVARVILTQVGSGPQETNESLIDAKTGLPKE

SEQ ID NO: 35 - protein, 324 aa, Oceanbacillus iheyensis
MKATAKAHTNIALIKYWGKRNEPIILPTNSNLSLTLDGFSTVTTVHFQEELSSDEFFLNDRLVEDAASQRVTGFLDKVRAMAGKEMYARIHSLNHVPTAAGFASSASGFAALAAASTKAIGLELNDTELSILTRQGSGSACRSIYGGFVEWQMGEKEDGSDSYAVPIASKDHWDIRVAAVVLSATEKKVSSRDGMRRTVETSPFYDGWLKQTPKDLEEIKTAIHDKDFEKTGSIAEANCMRMHATTLGANPPFTYWQDTTMRVMQNVQQMREEGIPAYFTIDAGPNVKVLYLPKDESKVKQRLEQIMGVEDVIVSKPGKGISYL

SEQ ID NO: 36 - protein, 326 aa, Anaerolinea thermophila
MGQATAIAHPNIAFIKYWGNRDAVLRIPENGSISMNLAELTVKTTVIFEKHSREDTLILNGALADEPALKRVSHFLDRVREFAGISWHAHVISENNFPTGAGIASSAAAFAALALAATSAIGLHLSERDLSRLARKGSGSACRSIPGGFVEWIPGETDEDSYAVSIAPPEHWALTDCIAILSTQHKPIGSTQGHALASTSPLQPARVADTPRRLEIVRRAILERDFLSLAEMIEHDSNLMHAVMMTSTPPLFYWEPVSLVIMKSVREWRESGLPCAYTLDAGPNVHVICPSEYAEEVIFRLTSIPGVQTVLKASAGDSAKLIEQSL

SEQ ID NO: 37 - protein, 326 aa, Bacillus coagulans
MEATARAHTNIALIKYWGKRDEKLFLPMNSSLSITLDRFYTTTKVAYDPALKADVFFLNGKPAIDAETAKISRFMDKIRAFAGEKRYAYIESQNEVPIAAGLASSASGMAALAAAAVKALGIEVDGRTLSILARQGSGSACRSIYGGFVEWQKGEKADGSDSYAVPILGEDDWNLSILSCLVESKQKKISSREGMKRTVTTSPFYKAWMETVEKDLAAAKSAIAARDFALLGRVLEANALKMHATTISADPPFLYWQSATLDVMQEVALLRERGIEAYFTIDAGPNVKVLCERKDEETVYNALAAVPSVREVLVCHPGPGIQYGPF

SEQ ID NO: 38 - protein, 396 aa, Saccharomyces cerevisiae; identical to SEQ ID NO: 34

SEQ ID NO: 39 - protein, 415 aa, Hevea brasiliensis
MAESWVIMVTAQTPTNIAVIKYWGKRDEKLILPVNDSISVTLDPAHLCTTTTVAVSPSFAQDRMWLNGKEISLSGGRYQNCLREIRARACDVEDKERGIKISKKDWEKLYVHIASYNNFPTAAGLASSAAGFACLVFALAKLMNAKEDNSELSAIARQGSGSACRSLFGGFVKWKMGKVEDGSDSLAVQVVDEKHWDDLVIIIAVVSSRQKETSSTTGMRETVETSLLLQHRAKEIVPKRIVQMEESIKNRNFASFAHLTCADSNQFHAVCMDTCPPIFYMNDTSHRIISCVEKWNRSVGTPQVAYTFDAGPNAVLIAHNRKAAAQLLQKLLFYFPPNSDTELNSYVLGDKSILKDAGIEDLKDVEALPPPPEIKDAPRYKGDVSYFICTRPGQGPVLLSDESQALLSPETGLPK

SEQ ID NO: 40 - protein, 415 aa, Hevea brasiliensis
MAESWVIMVTAQTPTNIAVIKYWGKRDEKLILPVNDSISVTLDPVHLCTTTTVAVSPSFAQDRMWLNGKEISLSGGRYQNCLREIRARACDVEDKERGIKISKKDWEKLHVHIASYNNFPTAAGLASSAAGFACLVFALAKLMNAKEDHSELSAIARQGSGSACRSLFGGFVKWKMGKVEDGSDSLAVQVVDEKHWDDLVIIIAVVSSRQKETSSTTGMRETVETSLLLQHRAKEIVPKRIVQMEESIKNRNFASFAHLTCADSNQFHAVCMDTCPPIFYMNDTSHRIISCVEKWNRSVGTPQVAYTFDAGPNAVLIAHNRKAAAQLLQKLLFYFPPNSDTELNSYVLGDKSILKDAGIEDLKDVEALPPPPEIKDAPRYKGDVSYFICTRPGRGPVLLSDESQALLSPETGLPK

SEQ ID NO: 41 - protein, 717 aa, Arabidopsis thaliana
MASSAFAFPSYIITKGGLSTDSCKSTSLSSSRSLVTDLPSPCLKPNNNSHSNRRAKVCASLAEKGEYYSNRPPTPLLDTINYPIHMKNLSVKELKQLSDELRSDVIFNVSKTGGHLGSSLGVVELTVALHYIFNTPQDKILWDVGHQSYPHKILTGRRGKMPTMRQTNGLSGFTKRGESEHDCFGTGHSSTTISAGLGMAVGRDLKGKNNNVVAVIGDGAMTAGQAYEAMNNAGYLDSDMIVILNDNKQVSLPTATLDGPSPPVGALSSALSRLQSNPALRELREVAKGMTKQIGGPMHQLAAKVDEYARGMISGTGSSLFEELGLYYIGPVDGHNIDDLVAILKEVKSTRTTGPVLIHVVTEKGRGYPYAERADDKYHGVVKFDPATGRQFKTTNKTQSYTTYFAEALVAEAEVDKDVVAIHAAMGGGTGLNLFQRRFPTRCFDVGIAEQHAVTFAAGLACEGLKPFCAIYSSFMQRAYDQVVHDVDLQKLPVRFAMDRAGLVGADGPTHCGAFDVTFMACLPNMIVMAPSDEADLFNMVATAVAIDDRPSCFRYPRGNGIGVALPPGNKGVPIEIGKGRILKEGERVALLGYGSAVQSCLGAAVMLEERGLNVTVADARFCKPLDRALIRSLAKSHEVLITVEEGSIGGFGSHVVQFLALDGLLDGKLKWRPMVLPDRYIDHGAPADQLAEAGLMPSHIAATALNLIGAPREALF

SEQ ID NO: 42 - protein, 638 aa, Alpha proteobacterium
MVDYKTPLLDTVRIPSDLKGLGVDALKQVADELRTETIDAVSMTGGHLGAGLGVVELTVALHHVFDAPNDKIIWDVGHQAYPHKILTDRRDRIRTLRQGGGLSGFTRRSESEYDPFGAAHSSTSISAGLGMAVARDLKGERFNVVAVIGDGAMSAGMAYEAMNNAGSMDSRLIVILNDNDMSIAPPVGAMSAYLSQIVSSRSYRSLRHMAKQVAQHLPKAIERTAKRAEEFARGMVTGGTLFEELGFLYVGPVDGHNLDHLLPVLKNLRDTPGHGPVLLHVVTEKGRGHPFAETSADKYHAVAKFDVVTGTQAKPKANAPSYTNVFADSLIAEAEADDRVVAITAAMPTGTGLDRFEKRFPERLFDVGIAEQHAVTFAAGLAAEGMKPFAAIYSTFLQRGYDQVVHDVAIQSLPVRFAIDRAGLVGADGATHAGSFDLAYLGCLPGFVIMAPSDEAELVHMVATAAAIDDRPSAVRYPRGEGVGVELPARGQPLEIGRGRVVREGTSVALLSLGGRLQECLSAADDLAARGLSTTVADARFAKPIDTALLRRLAAEHAVLITVEEGSIGGFSSQVLHYLATEGLLDRGLVVRPLVLPDRFIDHDKPEVQYAQAGLDAAGIVATALAALGKDAEAAVRA

SEQ ID NO: 43 - protein, 650 aa, Parvibaculum lavamentivorans
MLNSKPPTPLLDRVTVPADLRALGEGDLRQLAEELRAEMVDAVSQTGGHLGAGLGVVELTVALHYVFNTPEDRIIWDVGHQAYPHKILTGRRDRIRTLRQGDGLSGFTKRAESEYDPFGAAHSSTSISSGLGMAVARDLKGGTNNVVAVIGDGAMSAGMAYEAMNNAGSMNSRLIIILNDNDMSIAPPVGAMSAYLARLLSGGAYRSMRHLAKQLAQLLPKRLEESARRAEEYARGMATGGTLFEELGLYYVGPIDGHNFDHLLPVLKNVRDAGEGPILVHVVTQKGKGYAPAEAAEDKYHGVSKFDVVTGTQAKAQANAPSYTKVFAESLIAHAEEDDKIVAITAAMPGGTGLDLFAQRFPGRTFDVGIAEQHAVTFAAGLATEGFKPFATIYSTFLQRAYDQVVHDVAIQRLPVRFAIDRAGLVGADGPTHAGSFDVTYLACLPGFVVMAAADEVELKHMVATAVAIDDRPSSLRYPRGEGVGIEMPAIGTPLEIGKGRILRQGTKVAILSLGTRLAEALKAAEQLGALGLSTTVVDARFAKPLDEDLIARLAREHELLITVEEGSIGGFGSHVLDFLAHSGALDRGLKVRPMALPDIFIDQDKPEKMYDIAGLNAAQIVETALSVLGQERQIADFRQMTPQPLPKLV

SEQ ID NO: 44 - protein, 644 aa, Magnetospirillum magneticum
MTPPPATGKPSSSLLDRVSSPADIRDFSIEELEQLTYEVRQEMIQSVSFTGGHLGAGLGVAELTVALHHIFDTPRDRLIWDVGHQAYPHKILTGRRGRMRTMRQGGGLSGFTRRSESEYDPFGAGHSSTSISAALGMAVARDLKGATNNVIAVIGDGAMSAGQAYEAMNNAGAAGSRLIVILNDNDMSIAPPVGALSAHLSRLLSSPSYHSLRHLVKDLAHLLPPSLERAVGRAEEYARGMVSGGGTLFEELGFYYVGPIDGHNFEHLLPVLKNLRDSDDTKPVMLHVVTKKGRGYPPAEAAADKYHGVGRFDVLTGQLEKPKANAPSYTSVFAKALIAEAEVDDRVVAITAAMPGGTGLDKFGDRFPARTFDVGIAEQHAVTFAGGLATEGFKPFCAIYSSFLQRAYDQVQHDVVLQKLPVRFAIDRAGLVGADGATHAGSYDMAFLGCLPDIVIMCPSDEADLMHAVATAVSIDDRPSAFRYPRGEGVGIELSERGSVMPIGKGRVVREGNRVAILSLGTRLAEALKAADELAARGLAPTVVDARFMKPLDEELILRLAREHEVLITVEEGSVGGFGSHVLHLLASKGALDNGLKVRPLALPDVFVEHDAPAIQYEKIGLNASGIVATVLATLGEARSVVSA

SEQ ID NO: 45 - protein, 362 aa, Clavispora lusitaniae
MSKLSSVAKTSMLAARANVAGAMRMASGASGPKTMTVRDALNTALAEELDRDDDVFLMGEEVAQYNGAYKISKGLLDRFGERRVIDTPITEMGFTGVTVGAALAGLKPICEFMTFNFAMQSIDHIINSAAKTLYMSGGIQPCNITFRGPNGAAAGVAAQHSQCYAAWYGSIPGLKVLSPYSAEDYRGLIKAAIRDPNPVVFLENEILYGESFEVSEEALSPDFVLPIGKAKIEREGADITLVGHTRSVKHCLDAAKLLESQYGVSAEVINLRSIKPLDVPCIVESVKKTKHLVTVEEGFPAFGVGSEICAQIMESEAFDYLDAPVERVTGCEVPTPYAKELEDFAFPNEDIVLRASRKVLGL

SEQ ID NO: 46 - protein, 404 aa, Fusarium oxysporum
MKHRVIHQFKRAHVVSNPSTARLSLALPVGRKCYSTHPPNAKLNLPVDYGTTPLLAHNSQAALSHKELPLSIRNGPTKKMNLFQAINDAMGIALAEDESVVIFGEDVAFGGVFRCTMNLAETHGAERVFNTPLTEQGIMGFGIGLAAEGMRPIAEIQFADYVYPAFDQLVNEAAKFRYRDGSCGRSVGGLTVRMPCGGVGHGGLYHSQSPESLFTHIPGLKVIMPRSPAQAKGLLLAAIRSNDPCVFMEPKILYRAAVEQVPVGSYELPLSKAEILKEGKDVTIVSYGQPLYLCQNAIKQAEQDLGISVELIDLRTLYPWDKQTVLQSVRKTGRVMVVHEAMVNAGIGAEVAATIQEDHDTFLRLEAPVARVAGWSIHSPLLYEKFNVPDVARIYDNIKKLLNY

SEQ ID NO: 47 - protein, 379 aa, Candida albicans
MSSLSSVTRSAKLATQSLKYNTRPSLSKIGQFQTSKITYRANSTQSTPVKEITVRDALNQALSEELDRDEDVFLMGEEVAQYNGAYKVSRGLLDKFGEKRVIDTPITEMGFTGLAVGAALHGLKPVLEFMTWNFAMQGIDHILNSAAKTLYMSGGKQPCNITFRGPNGAAAGVAAQHSQCYAAWYGSIPGLKVLSPYSAEDYKGLLKAAIRDPNPVVFLENEIAYGETFKVSEEFSSPDFILPIGKAKIEKEGTDLTIVGHSRALKFAVEAAEILEKDFGIKAEVLNLRSIKPLDVPAIVDSVKKTNHLVTVENGFPGFGVGSEICAQIMESEAFDYLDAPVERVTGCEVPTPYAKELEDFAFPDTEVILRACKKVLSL

SEQ ID NO: 48 - protein, 720 aa, Hevea brasiliensis
MALSACSFPAHVDKATISDLQKYGYVPSRSLWRTDLLAQSLGRLNQAKSKKGPGGICASLSERGEYHSQRPPTPLLDTTNYPIHMKNLSIKELKQLADELRSDVIFNVSRTGGHLGSSLGVVELTVALHYVFSAPRDKILWDVGHQSYPHKILTGRREKMYTIRQTNGLSGFTKRSESEYDCFGTGHSSTTISAGLGMAVGRDLKGKKNNVVAVIGDGAMTAGQAYEAMNNAGYLDSDMIVILNDNKQVSLPTATLDGPIPPVGALSSALSRLQSNRPLRELREVAKGVTKQIGGPMHEWAAKVDEYARGMISGSGSTLFEELGLYYIGPVDGHNIDDLIAILKEVKSTKTTGPVLIHVVTEKGRGYPYAEKAADKYHGVTKFDPATGKQFKGSAITQSYTTYFAEALIAEAEVDKDIVAIHAAMGGGTGLNLFLRRFPTRCFDVGIAEQHAVTFAAGLACEGLKPFCAIYSSFMQRAYDQVVHDVDLQKLPVRFAMDRAGLVGADGPTHCGAFDVTFMACLPNMVVMAPSDEAELFHMVATAAAIDDRPSCFRYPRGNGVGVQLPPGNKGIPLEVGKGRILIEGERVALLGYGTAVQSCLAAASLVEPHGLLITVADARFCKPLDHTLIRSLAKSHEVLITVEEGSIGGFGSHVAHFLALDGLLDGKLKWRPLVLPDRYIDHGSPSVQLIEAGLTPSHVAATVLNILGNKREALQIMSS

SEQ ID NO: 49 - protein, 720 aa, Hevea brasiliensis
MALSACSFPAHVNRNTISDLQKYSYVSSHFLSRKNPLAQSLHRLNQAKSKRRPERVCASLSEREEYHSQRPPTPLLDTINYPIHMKNLSIKELKQLADELRSDVIFNVSGTGGHLGSSLGVVELTVALHYVFNAPQDKILWDVGHQSYPHKILTGRRDKMHTIRQTNGLSGFTKRSESEYDCFGTGHSSTTISAGLGMAVGRDLKGRKNNVVAVIGDGAMTAGQAYEAMNNAGYLDSDMIVILNDNKQVSLPTATLDGPIPPVGALSSALSRLQSNRPLRELREVAKGVTKRIGGSMHELAAKVDEYARGMISGSGSTLFEELGLYYIGPVDGHNIDDLIAILKEVKGTKTTGPVLIHVVTEKGRGYPYAEKAADKYHGVTKFDPATGKQFKGSAITQSYTTYFAEALIAEAEVDKDIVAIHAAMGGGTGLNLFLRRFPTRCFDVGIAEQHAVTFAAGLACEGLKPFCAIYSSFMQRAYDQVVHDVDLQKLPVRFAMDRAGLVGADGPTHCGAFDVTFMACLPNMVVMAPSDEAELFHMVATAAAIDDRPSCFRYPRGNGVGVQLPPGNKGIPLEVGKGRILIEGERVALLGYGTAVQSCLAAASLVEPHGLLITVADARFCKPLDHTLIRSLAKPHEVLITVEEGSIGGFGSHVAHFLALDGLLDGKLKWRPLVLPDRYIDHGSPSVQLIEAGLTPSHVAATVLNILGNKREALQIMSS

SEQ ID NO: 50 - protein, 477 aa, Arabidopsis thaliana
MMTLNSLSPAESKAISFLDTSRFNPIPKLSGGFSLRRRNQGRGFGKGVKCSVKVQQQQQPPPAWPGRAVPEAPRQSWDGPKPISIVGSTGSIGTQTLDIVAENPDKFRVVALAAGSNVTLLADQVRRFKPALVAVRNESLINELKEALADLDYKLEIIPGEQGVIEVARHPEAVTVVTGIVGCAGLKPTVAAIEAGKDIALANKETLIAGGPFVLPLANKHNVKILPADSEHSAIFQCIQGLPEGALRKIILTASGGAFRDWPVEKLKEVKVADALKHPNWNMGKKITVDSATLFNKGLEVIEAHYLFGAEYDDIEIVIHPQSIIHSMIETQDSSVLAQLGWPDMRLPILYTMSWPDRVPCSEVTWPRLDLCKLGSLTFKKPDNVKYPSMDLAYAAGRAGGTMTGVLSAANEKAVEMFIDEKISYLDIFKVVELTCDKHRNELVTSPSLEEIVHYDLWAREYAANVQLSSGARPVHA

SEQ ID NO: 51 - protein, 396 aa, Oscillatoria sp. PCC 6506
MKAITLLGSTGSIGTQTLDIVAQYPDQFRIVGLAAGRNVTLLAKQIRQFRPEIVAISDVDKLPELKEAIADLDPQPILLAGETGIVEVAKYGDAQAVVTGIVGCAGLLPTIAAIEAGKDIALANKETLIAGGPVVNPLIAKHGVKLLPADSEHSAIFQCLQGLPKGGLRRIILTASGGAFRDWPVEKLSEVKVADALKHPNWSMGRKITVDSATLMNKGLEVIEAHYLFGMDYDGIDIVIHPQSIIHSLIELQDTSVLAQLGWPDMRLPLLYALSWPERIYTDWEPLNLVKSGDLTFREPDHQKYPCMQLAYTAGRAGGSMPAVLNAANEEAVALFLDEKIEFLDIPRLIERTCEKHQADNCANPSLDDIIAADKWARQEALAGTKELGDRLVFLR

SEQ ID NO: 52 - protein, 398 aa, Nostoc azollae
MKAITLLGSTGSIGTQTLDIVSEHPDKFRIVGLAAGRNVELFAAQIRQFRPQIVAISAADKLPELREAIKHVNPQPILLAGEEGVIEVARYGDVETVVTGIVGCAGLLPTIAAIEAGKDIALANKETLIAGAPVVLPLVEKYGVKLLPADSEHSAIFQCLQGVPKGGLRKILLTASGGAFRDWPVEKLPEVKVADALKHPNWSMGRKITVDSATLMNKGLEVIEAHYLFGVDYDDIEIVIHPQSIIHSLIELQDTSILAQLGWPDMRLPLLYALSWPERVYTNWERLNLVKSGDLTFHEPDHQKYPCMGLAYAAGRAGGSMPGVLNAANEQAVALFLEEKISYLDIARCIELVCDHHQRDNTRNPSLSDILAADQWARQEVFTATEKLVIQPQIISLG

SEQ ID NO: 53 - protein, 389 aa, Synechococcus sp. PCC 7335
MKAITLLGSTGSIGTQTLDILAQYPDKFRLVGIAAGSNVALLAKQVMQFQPEIVAICDESKLTELREAIASLEPQPIIVSGEAGIVEVARYGDAEAVVTGIVGCAGLLPTIAAIKAGKDIALANKETLIAGGPVVLPLAKQHGVKLLPADSEHSAIFQCLQGVPEGGLRTIELTASGGAFRDWPVEELPNVTMADAIKHPNWSMGKKITVDSATLMNKGLEVIEAHYLFDLDYDDIDIVIHPQSIIHSMIHLQDTSVLAQLGWPDMRLPLLYAISWPERIPTDWKPLSLAELSMLSFRKPDHQKYPCMDLAYAAGRAGGTMSAVLNAANEQAVALFLEEKIHYLEIAKVIEQVCDRHQSDLNSSPNLEDILAVDQWARAAVTELTAVSA

SEQ ID NO: 54 - protein, 1692 aa, Ustilago maydis
MSKDQAEAPSQISQRFFNHEQGERTVKMRLSYYSLVCDFPFNEQLPLPDIPSHIRVLVFCQSRVSSPPVAARRVLLQAIPLHLFGYCASTQPYLLDGSGSYRRVHIVAFPVPFSDIEQTGAITLESKRDPSISSAASLSQLRKFLDQSPFGFAKYTPSTSVTAISDHPRSSSSLAHLLTRFHPIGTMSAIANAATNGSSANGQPSALSAQAQQMLTGMTKERLHGMIARMQQLKASGVNESTSSEYATLVNTLKMFQQYQAMRQQQAVAMQARATQQQTTPSTPTKPASSASSPSQPAIASTPALDASSANGVVLKTEEEISRSLSPANLTPDQLNALKTQIIAFKLISRNQPLPSHLQEAILAADRESEVQDTKDGILTTASHIAAAAVASSKVGAAKDAPKVSSSTENATASTAPSDKIVEIPRPPSPKDDPTSSVYPYNAYVHPFSYISKPLLEDDDYTATKQQRLLIPSLMPAGLEPRLLLEERDRFVQARIRQRIRELESFPADMSQSPTMASLKGKENAHDLTSQLHGSHLQGDNAKLKALIELKSLHLLEKQKQLREQVVQSLNLATTLGLDRVAFRRVKKQTLRDARMTEQLERKQRVEREKRARQKHIDYLSTICNHGRDLVAAHTRMNDQARRFGRAMLKFHADSEREEQKRVERIAKERLNALKADDEEAYLKLIDTAKDTRITHLLRQTDGYLDSLAQAVQAQQNDDVHADAIAAERAVEESANQEVGVAVDETMFGATRQDDPSEDRGKVDYYSVAHRITERITQQPSILSGGTLKEYQMKGLQWMISLYNNRLNGILADEMGLGKTIQTISLITYLMEFKKQNGPFLVIVPLSTLTNWVNEFNKWAPSVSTLIYKGTPNVRKQLTGRLRSMNFQVLLTTYEYIIKDKHLLGKIKWVHMIIDEGHRMKNTQSKLTITLTQFYTSRYRLLLTGTPLQNNLPELWALLNFVLPRIFNSVKSFDEWFNTPFTNTGSEGGMMLNEEEALLIIKRLHKVLRPFLLRRLKKDVASELPDKVEKVIKCKMSALQLKLYQQMKKHKMILSGEDNSTAGKKAKPQGIRGLQNAIMQLRKICNHPYVFEQVELAINPTKENGPDLYRVAGKFELLDRLLPKLFATKHRVLIFFQMTAIMDIMEDFLRYRGFKYLRLDGSTKPDDRSQLLKLFNAPGSDYFVFILSTRAGGLGLNLQSADTVIIYDSDWNPHQDLQAQDRAHRIGQKMEVRILRLVTEKSVEETILARAQDKLEIEGKVIQAGKFDNQATADERELLLRAMLEADNDDEDDDDGDFNDDELNQLLARGEHEVPIFQQIDNERQASDTEFWKSLGYKGKLPERLMQESELPAVYQQDFDADKLEDEVEEEQPATRKRNVVHYDDGLTEDQFLRALEDDDVDLNDIVERKRERIEKRRAKAMMQSMDSTEGTPEVEGGRRKKGVGRGRGLGGASETPEPSPGPSARKRKRFGGVSMDGSPDYEESPSAARIAQPKRRKTGGEDDVRDRIKYALNQCYRAVETCLEPETGRKRCLLFLDVPKKTDYPDYHVIIEKPIAMRQIKRRIDNRTFRRVDTCRDEFHLMVRNAKTYNQEGSWVYNDAVELQKAFDTTYDMLCRFSGLPGSENEGEAAAGDTSVNDTQNEAEDDNDDGGEDDDEDGKPVAAAPRGIKIRLGKRSKVVKNGKRDESDDDE

SEQ ID NO: 55 - protein, 582 aa, Emericella nidulans
MPDATGVIARNPFEEAPSRLNQYTPEEAAALQARLEKKLGPEYISSRPGAAGLKVHYLAADKCINLANEVFGFNGWSSSIQNIQIDFVDESPNTGKVSLGLSVIVRVTLKDGAYHEDLGYGHIENCKGKAAAFEKAKKEATTDALKRALRNFGNVLGNCIYDKDYISKVSKLKTVPSKLDVGDLHRHPDFAPIKKEPMRVKPSLEDDDLPPNPSIAGRNTSTNSAADMDAEFGSDVFDEADFNVGEGEYPDGIVAEDTQKRHQPPTPVGRPNAHLNLPKHALGAQASGNQHVVTPSKPERPMNLAPAGRQIPNQALNNRPFPPPAQNQYTNQRQSVPLPGSNGGLQNGRSIPLGQRASNGMATGSDAGAQVPIKQEHGAKQPNPAPQNTAVPATPGINGQGPPVVGFLSARGADMLRENPHSAATVAPAFNPHAESPSIRKTAGVDHTKSIPISKPMLAGSASPLSNQTRDFINPSAEMHRKIGAPSGSVVGGPMNRGPSVSSYRPLTRPNVDPKAAAQNNTAAANRMAPNMNGKRPPLNDVTNETLPGGNGCTPAPGLNDPKRAKYDESMSAQQHQQQHQH

SEQ ID NO: 56 - protein, 471 aa, Hevea brasiliensis
MALNLLSPAEIKAISFLDSTKSSHLTKLPGGFSLKRKDFGAAFGKKVQCSAQPPPPAWPGRAFPDLGRKTWDGPKPISVVGSTGSIGTQTLDIVAENPDKFRVVALAAGSNVTLLADQVKTFKPQLVAVRNESLVHELREALADVEEKPEIIPGEQGVVEVARHPDAVSVVTGIVGCAGLKPTVAAIEAGKDICLANKETLIAGGPFVLPLAHKYNVKILPADSEHSAIFQCIQGLPDGALRRIILTASGGAFRDWPVDKLKEVKVADALKHPNWNMGKKITVDSATLFNKGLEVIEAHYLFGAEYDNIEIVIHPQSIIHSMVETQDSSVLAQLGWPDMRLPILYTMSWPDRIYCSEITWPRLDLCKLGSLTFKAPDNVKYPSMDLAYAAGRAGGTMTGVLSAANEKAVEMFINEKIGYLDIFKIVELTCDKHRSELVASPSLEEIIHYDLWARDYAASLQPTSGLSPVLA

SEQ ID NO: 57 - protein, 471 aa, Hevea brasiliensis
MALNLLSPAEIKAISFLDSTKSSHLTKLPGSFSLNRKDFGAAFGKKVQCSAQPPPPAWTGRAFPDLGRKTWDGPKPISVVGSTGSIGTQTLDIVAENPDKFRVVALAAGSNVTLLADQVKTFKPQLVAVRNESLVHELREALADVEEKPEIIPGEQGVVEVARHPDAVSVVTGIVGCAGLKPTVAAIEAGKDICLANKETLIAGGPFVLPLAHKYNVKILPADSEHSAIFQCIQGLPDGALRRIILTASGGAFRDWPVDKLKEVKVADALKHPNWNMGKKITVDSATLFNKGLEVIEAHYLFGAEYDNIEIVIHPQSIIHSMVETQDSSVLAQLGWPDMRLPILYTMSWPDRIYCSEITWPRLDLCKLGSLTFKAPDNVKYPSMDLAYAAGRAGGTMTGVLSAANEKAVEMFINEKIGYLDIFKIVELTCDKHRSELVASPSLEEIIHYDLWARDYAASLQPTSGLSPVLA

SEQ ID NO: 58 - protein, 471 aa, Hevea brasiliensis
MELNLLSPAEIKAISFLDSTKSNHLPKFPGVISLKRKDFGAAFGRKVQCSAQPPPPAWPGRAFPEPGRKTWDGPKPISVVGSTGSIGTQTLDIVAENPGKFRVVALAAGSNVTLLADQVKTFKPQLVAVRNESLADELKDALADLEEKPEIIPGEEGVVEVARHPDAVSVVTGIVGCAGLKPTVAAIEAGKDICLANKETLIAGGPFVLPLAHKYNVKILPADSEHSAVFQCIQGLPDGALRRIILTASGGAFRDWPVDRLKEVKVADALKHPNWNMGKKITVDSATLFNKGLEVIEAHYLFGADYDNIEIVIHPQSIIHSMVETQDSSVLAQLGWPDMRLPILCTMSWPERIYCSEITWPRLDLCKLGSLTFKAPDNVKYPSMDLAYAAGRAGGTMTGVLSAANEKAVEMFIDEKISYLDIFKIVELTCDKHRAELVTSPSLEEIIHYDLWARDYAASLQPSSGLSPVLA

SEQ ID NO: 59 - protein, 302 aa, Arabidopsis thaliana
MAMLQTNLGFITSPTFLCPKLKVKLNSYLWFSYRSQVQKLDFSKRVNRSYKRDALLLSIKCSSSTGFDNSNVVVKEKSVSVILLAGGQGKRMKMSMPKQYIPLLGQPIALYSFFTFSRMPEVKEIVVVCDPFFRDIFEEYEESIDVDLRFAIPGKERQDSVYSGLQEIDVNSELVCIHDSARPLVNTEDVEKVLKDGSAVGAAVLGVPAKATIKEVNSDSLVVKTLDRKTLWEMQTPQVIKPELLKKGFELVKSEGLEVTDDVSIVEYLKHPVYVSQGSYTNIKVTTPDDLLLAERILSEDS

SEQ ID NO: 60 - protein, 229 aa, Parachlamydia acanthamoebae
MTVSVILLAGGIGARMRQNLPKQFLPLVEKPVAFYSLECFMELSEVGEIVVVCDPAYHALFADYAQDTRIHFALPGVRRQDSVWSGLQAIKQASQIVCIHDAARPFIDHALIKRVLSAASEHGAATVGMPIKFTLKQSTATGFVDKTLDRSLLWEIQTPQAVDFHLLYQGFDKVHQMGIDVTDDVSIIELLEKPVKLVEGDYANLKITTPEDMVVAEQWLAKKVGDRVL

SEQ ID NO: 61 - protein, 226 aa, Simkania negevensis
MTQTMPTIAAILLAGGTGSRMGGPIPKQFLPLKGQPIVQYSFDLFLSLPEISEIIVVCKPQFQTFFEKSPLKPIQFALPGKERQDSVASGFAHVSPSCEYVLIHDSARPLIQEEEVRKLIEEGLLIGAATLGVPMKYTVKEVDENGIVKKTLDRSRLYNIQTPQLLRRDILSKGLKKAQKQGLTLTDDVSLAELIHHPVKIVYGSDENLKITTPEDFEVAKQLVYV

SEQ ID NO: 62 - protein, 230 aa, Protochlamydia amoebophila
MEHQLIPFTVVLLAGGMGTRMKNLIPKQYLTIQEKPIALHSFEKLASMPEIEQMIVVCEPQYEQLFTVYKLNKPLIFARPGLRRQDSLWNGIKLIAGNPLVCIHDSARPFIEIDRIRQTVAEAEKWGAAVLGVRVKATIKICEEKQFIVNTPNRAFLWEMQTPQIVRLKLLYDGFSVAQKNELTVSDDVSLVELIDKPVKVVEGSYLNIKITTPEDLLIAQSILKNHALL

SEQ ID NO: 63 - protein, 420 aa, Aspergillus oryzae
MSSTLPTFGTVLVAAGTGTRAGNAKCSKVYRELAGETVISRVVRAFRAWDPGHPIVIVRHENDAALLANAIEGADGQVYETVGEATRQASVLEGLIFLSSLEQPPSHVLIHDAARRFISPSLLDKTRHGMREQPDVGIILAIPVSDTIKSVDENGLISRTVPRKGLYRAQTPQAFSLPTALKIHDQLAYDTSVEYTDDASLFEQAGLSVRVIQGEEKNMKLTYPTDFEQAERILQAKPRLPEVSIPDVRVGHGYDTHRLSPATEITLCDVKIPHTSGLLGHSDADVGLHAVTNALLGTIGADDIRSHFSPSDPKWKGASSDQFVRHARKLVSDADGVITHGDVSLICERPKIGPHRDALKTSVARILSLDKSRVSIKAGTNEKVGFVGREEGIIGFATVTAVFPGGVPQAEINPDYDTTY

SEQ ID NO: 64 - protein, 1072 aa, Candida glabrata
MAEASAHFSFPKEEENVLALWNEIDAFHRSMELTKDKPEFSFFDGPPFATGTPHYGHILASTIKDIVPRYATMTGHHVERRFGWDTHGVPIEHIIDKKLGIKGKEDVFKYGLDNYNNECRAIVMTYADEWRKTIGRLGRWIDFDNDYKTMYPSFMESVWWAFKQLHEKGQVYRGFRVMPYSTGLTTPLSNFEAQQNYKDVNDPAVTIGFNVIGQEKTKLVAWTTTPWTLPSNLALCVNPEFEYVKIYDENKDCYFILLESLIKTLYKKPAAEKYKIVEKIKGSELVGLKYEPIFPYFYEQMKETAFRVIAGDYVTADSGTGIVHNAPSFGEEDYAVCLENGVISEDTVAPNPVDDNGKFTSDVTDFAGIYVKDADKLIIKHLTETGNLLLASQIRHSYPFCWRSDTPLLYRSVPAWFVRVKEIAPKMLDSVMNSHWVPNTIKEKRFANWIANARDWNVSRNRYWGTPIPLWVSDDFEEIVCVGSIEELEQLSGVKNITDLHRDKIDHITIPSKMGKGDLKRIEEVFDCWFESGSMPYASQHYPFENTEKFSDRVPANFISEGLDQTRGWFYTLSVLGTHLFGEVPYKNVIVSGIVLASDGRKMSKSLKNYPDPNIVLEKYGADALRLYLINSPVLKAESLKFKEEGVKEVVTKVLLPWWNSYKFLEGQLALLKKTSDVDFKYDPKLSSDNVMDRWILASMQSLVQFIHQEMAVYKLYTVVPKLLHFIDELTNWYIRFNRRRLKGENGVDDCLKALNTLFDALFTFARAMAPFTPFLADGIYQRLRAYIPEEVLAQFGQDGRSVHFLSYPEVRQELFDEAIETAVGRMQSVIDLGRNIREKKTISLKTPLKTLVILHSDETYLKDIEALKNYIIEELNVRDVIITTDEEKYGVEYKVVADWPVLGKKLKKDAKKVKDALPKVSSDEVKQYMETGKLVVDGIELVAGDLNVIRGLPESAAANGQETRTDQEVLIILDTNVYEDLKTEGLARELINRIQKLRKKCGLEATDDVLVEYELVKDTINFEDVVNTHRDMLTKTCRSNIALCDGSKDHALVDEEQSINDTIFKLKIFKL

SEQ ID NO: 65 - protein, 1072 aa, Saccharomyces cerevisiae
MSESNAHFSFPKEEEKVLSLWDEIDAFHTSLELTKDKPEFSFFDGPPFATGTPHYGHILASTIKDIVPRYATMTGHHVERRFGWDTHGVPIEHIIDKKLGITGKDDVFKYGLENYNNECRSIVMTYASDWRKTIGRLGRWIDFDNDYKTMYPSFMESTWWAFKQLHEKGQVYRGFKVMPYSTGLTTPLSNFEAQQNYKDVNDPAVTIGFNVIGQEKTQLVAWTTTPWTLPSNLSLCVNADFEYVKIYDETRDRYFILLESLIKTLYKKPKNEKYKIVEKIKGSDLVGLKYEPLFPYFAEQFHETAFRVISDDYVTSDSGTGIVHNAPAFGEEDNAACLKNGVISEDSVLPNAIDDLGRFTKDVPDFEGVYVKDADKLIIKYLTNTGNLLLASQIRHSYPFCWRSDTPLLYRSVPAWFVRVKNIVPQMLDSVMKSHWVPNTIKEKRFANWIANARDWNVSRNRYWGTPIPLWVSDDFEEVVCVGSIKELEELTGVRNITDLHRDVIDKLTIPSKQGKGDLKRIEEVFDCWFESGSMPYASQHYPFENTEKFDERVPANFISEGLDQTRGWFYTLAVLGTHLFGSVPYKNVIVSGIVLAADGRKMSKSLKNYPDPSIVLNKYGADALRLYLINSPVLKAESLKFKEEGVKEVVSKVLLPWWNSFKFLDGQIALLKKMSNIDFQYDDSVKSDNVMDRWILASMQSLVQFIHEEMGQYKLYTVVPKLLNFIDELTNWYIRFNRRRLKGENGVEDCLKALNSLFDALFTFVRAMAPFTPFLSESIYLRLKEYIPEAVLAKYGKDGRSVHFLSYPVVKKEYFDEAIETAVSRMQSVIDLGRNIREKKTISLKTPLKTLVILHSDESYLKDVEALKNYIIEELNVRDVVITSDEAKYGVEYKAVADWPVLGKKLKKDAKKVKDALPSVTSEQVREYLESGKLEVAGIELVKGDLNAIRGLPESAVQAGQETRTDQDVLIIMDTNIYSELKSEGLARELVNRIQKLRKKCGLEATDDVLVEYELVKDTIDFEAIVKEHFDMLSKTCRSDIAKYDGSKTDPIGDEEQSINDTIFKLKVFKL

SEQ ID NO: 66 - protein, 311 aa, Hevea brasiliensis
MGHHLLRMNLTSIASSASFKSSNSLFPCNHHQIPSNSFHLPFHSKSSGHKISWIQKLPRIVTISVKCSAKIENSSAAVKEKSVSVILLAGGKGKRMGASMPKQYLPLLGQPIALYSFYTFSKMIEVKEIVVVCDPSYQDIFEDAKENINVDLKFALPGKERQDSVYSGLQEVDLNSELVCVHDSARPLVSSADVKKVIEDAWINGAAVLGVPAKATIKEANSESFVVRTLDRKTLWEMQTPQVIKPDLLKKGFELVSRDGLEVTDDVSIVEHLKHPVYITEGSYTNIKVTTPDDLLLAERILNLNSEESSK

SEQ ID NO: 67 - protein, 311 aa, Hevea brasiliensis
MGHHLLHLNLTIISPSASFKSSNSLFPCNHPQIPTNSFHLPSLSKSSVHKISWIQKLPRIATATIKCSAKIENSSAAAKEKSVSVILLAGGKGKRMGASMPKQYLPLLGQPIALYSFYTFSKMIEVKEIVVVCDPSYQDIFEDAKENINVDLKFALPGKERQDSVYSGLHEVDLNSELVCVHDSARPLVSSADVKKVIEDAWINGAAVLGVPAKATIKEANSESFVVRTLDRKTLWEMQTPQVIKPDLLKKGFELVNRDGLEVTDDVSIVEHLKHPVYITEGSYTNIKVTTPDDLLLAERILNLNSEESSK

SEQ ID NO: 68 - protein, 331 aa, Arabidopsis thaliana
MHHHHHHASMDREAGLSRLTLFSPCKINVFLRITSKRDDGYHDLASLFHVISLGDKIKFSLSPSKSKDRLSTNVAGVPLDERNLIIKALNLYRKKTGTDNYFWIHLDKKVPTGAGLGGGSSNAATTLWAANQFSGCVATEKELQEWSGEIGSDIPFFFSHGAAYCTGRGEVVQDIPSPIPFDIPMVLIKPQQACSTAEVYKRFQLDLSSKVDPLSLLEKISTSGISQDVCVNDLEPPAFEVLPSLKRLKQRVIAAGRGQYDAVFMSGSGSTIVGVGSPDPPQFVYDDEEYKDVFLSEASFITRPANEWYVEPVSGSTIGDQPEFSTSFDMS

SEQ ID NO: 69 - protein, 288 aa, Protochlamydia amoebophila
MRLSIIEIINSMFSIRLFSPAKINLFLKVIGKRADGYHELSSLFQTISAGDILTFQRQTIDTLTCSDPYLPTDDSNLVLKAMRLFRSKTGLDLHLRIHLDKRLPSQAGLGGGSSNAATTLWACNQLAGEIVTTEELMQWGSEIGADIPFFFSKGTAHCTGRGECVNSLEPLAHCKIWIVKPPFGLSTPEVYKHLNFSQPNENNNDYASFKEKPYFNDLEASAFEIKPELKILKNTLLSSGFDTVLMSGSGSSFFCIGQGQIPASFKAFSAYFINRSSNRWYSTLPKLT

SEQ ID NO: 70 - protein, 294 aa, Simkania negevensis
MNLKREAKSKLALFSPAKLNLFFRVLAKREDGYHEIASLMQAISLGDILYFEKGDFDTLTSSDSSLPCDETNLIWRARALFREKTGLFFPVQIHVEKRIPVEAGLGGGSSNLATTLWALNELGGNIATEADLRLWAGTFSSDAPFFFSPGTAYCTGRGEKITALAPLPNRKLWLAKPEGGMSTPLVYRHCKPHACSSEDPKKLLEEHVYVNDLEAPAFTLRSQLSQVKQDLLSLGFDCVVMTGSGSTFFCFGDVKTPKLDGVEMIPVTFLTRSENCWYNSRECEKMMSYGSTTL

SEQ ID NO: 71 - protein, 556 aa, Schizophyllum commune
MYASNFAVSRQQSYTRSTALASDIPTEPDIGSSGPEQYATSYYYGQPTGFAGSGSACTSSVAYAATAHDSPCIPTLEPGLHDWSAQLSQPFAASYGAAYATSVPYAFNTAPTPAYVQPQASSYAPDLQLQYPYDDFHANPSAYAGQHWESQAQLPPPMSSMADLPASSNSRHSTATAYHEDAASYKGAVAVAMSSSSQRRPAIASPLPRPAYRAIPPPAAHSRVHTPSDMAIQYSRKPAALPVLAKSKPVSSLKRKAHDAERVIVPPTPAPRERKHACTMCYKRFDRPSTLKKHILVHTGEKAFECTHCQRRFSVASNLNRHMKKCILKQQQPLPYGQPPSSSPTEARGGALIGRASSHSPPPPIARRITAAASISPPPPPPPPPPPPHPSKRIRRAPSPTRFVPASLREFNLQTPEAAGECAMPAPPVRPGDAIPLPDAEEELVDPCRITEAMFALLSLRCEDDPTPPPSESAQRKPKRPVPAPCAQRAEERDSYQENVHPYPCSREGWASKLPGPALGLMGKGIGQLYRTASSAWDEMTNVFKVKPQDVTESKA

SEQ ID NO: 72 - protein, 303 aa, Encephalitozoon cuniculi
MKKPLSGYGSSHPNIAVIKYWGKADTINNMPSSRSISFPLTNFLTETVVEHSLEEDRFYLNGKMLPIGEKMGRAVEIFRKKSGDDRPVCIRSFSNFPHSCGLASSASGLAALVLALNDFYGLDMPEEELCIAARIGSGSAGRSISTGIHLFDGMSVERLPSWKEVRILSIILSGDCKKTGSTEGMIRTKETSNFYQERLARIERKIKAMVQYISQKDFDGFAHLTMRESNELHAILMETYPPIRYIRDDGFKVIEMCHEFNRDRTRVAYTFDAGPNPFLITLEQHLHAVEDFFKAYELVPCNY

SEQ ID NO: 73 - protein, 388 aa, Hevea brasiliensis
MASAHFHCNNHVFHYSSNSFSKSNLPSFRPSGSVSFYQKQRTSFVKASKKQLEIVYDPEERLNKWADEVDKNAPLSRLTLFSPCKINIFLRITDKREDGYHDLASLFHVISLGDTIKFSLSPSKSKDRLSTNVSGVPLDERNLIIKALDLYRKKTGTDNFFWIHLDKRVPTGAGLGGGSSNAATALWAANQFSGGLATEKELLEWSSEIGSDISFFFSRGAAYCTGRGEIVQDIPTPVPLDLPMVLIKPQEACSTAEVYKRFRLDKTSQIDPLTLLEKISRNGISQDVCINDLEPPAFEVLPSLKRLKQRIIAASRGQYDAVFMSGSGSTIVGIGSPDPPQFIYDDDDYKDVFVSEANFLTREANQWYKEPASTATCSSQSDRSQSIE

SEQ ID NO: 74 - protein, 231 aa, Arabidopsis thaliana
MATSSTQLLLSSSSLFHSQITKKPFLLPATKIGVWRPKKSLSLSCRPSASVSAASSAVDVNESVTSEKPTKTLPFRIGHGFDLHRLEPGYPLIIGGIVIPHDRGCEAHSDGDVLLHCVVDAILGALGLPDIGQIFPDSDPKWKGAASSVFIKEAVRLMDEAGYEIGNLDATLILQRPKISPHKETIRSNLSKLLGADPSVVNLKAKTHEKVDSLGENRSIAAHTVILLMKK

SEQ ID NO: 75 - protein, 386 aa, Erythrobacter litoralis
MATPSPLPSFAAIVVAAGKGLRAGQPVPKQFATWRGKPVLRHSVESLRAAGADPIVVAIPDHAGDVAAKALDGITEVVFVTGGQTRQDSVRAALERLSSVPPERVLIHDAARAILPTPVIERVLHGLDESGGAIPVLPVVDSLAVAAGERMADKADRESLRRVQTPQGFRFSDILAAHRAWTGATDAGDDAQVLMAHGGDIALVEGDEALKKLTFAEDFMADLLPVRVGTGFDVHKLEAGEELWLGGIRLEHDKGLAGHSDADVALHAIVDALLGAIGKGDIGDHFPPSDPQWKGAASSAFIEHAAKLVDEAGYRVGNIDLTIICEAPRIGPHRDAMGQRIAELLATSPDAISVKATTTEKLGFTGRGEGIAAQAAATVVRKDTPA

SEQ ID NO: 76 - protein, 159 aa, Macrococcus caseolyticus
MMRIGYGYDVHQLVEGRTLIIGGIELEHDKGLLGHSDADVLLHAITDAILGAVSLGDIGKFFPDDDPKYKGADSKILLKEAYQHVLKLGYEIGNLDATIIAEKPKFRPHIDAMRESIANVLNTDIFNVNLKATTNEKMGYLGRQEGIQAQAVVLLLKTN

SEQ ID NO: 77 - protein, 420 aa, Aspergillus oryzae; identical to SEQ ID NO: 63

SEQ ID NO: 78 - protein, 933 aa, Aspergillus terreus
MVVSPNPPTIGIVVPAAGRGTRAGQGCQKAYRRIAGDTVINRVLKLFRSWHADCPIVIVHHADDTSLLEASIDRDQKIYTTTGGVERQASVLQGLRLLSTLDCVPSHVFIHDAARPFASHALLDSVLESLSTDPSIGVIPAIAVSDTLKKTDSNGLITATVPRDGLFRAQTPQAFEFWSILAAHERAAKSGSNYTDDASLFEQAGLPVRVVPGDPQNIKLTFSVDFEEAERFLQARNSPIAPPTIPDVRVGHGYDTHRLVPGEGVILCGVKIPHSASLLGHSDADVGLHALTNAFLGTIGADDIGSHFSPSDPQWKGASSDQFLRHAARLVVEAGGTITHCDVSFVCEKPRVSPYRDAMRDSVAGIVGLDRGRVSVKAGTNEKNGFLILGLIEIESRKIHYTCRASVGDAQELCMNPGPFTTQHTVAHKTIHKATAREQIDQAVREGYGFYLNFMWGTHDDSLAGVDAIRYFESLNLPSAGVQSAERAQSKWDFFAEAKRIGSPLVPGTERFPLFVKPASGYGSMFIDRHSLCHNEAELRQCIERLNKSMRPVRIQRAQALGHPAPEKYADDCEAAGGDSTDIVVQEFIDGEEYSVVVIAMGERPAPLTPQRVKYKQISEDERFMTLDLKFDPESGYELLHESENPDLYRHLQETAVEAFTTKKMYTNYMGCDVDMRLGRDGRAYVIEVDPLPVFFYPTGSQLEDTDVRYGFPGSYRAVLNTYITNYFLKNPGLREVRFTELAALFDQYSLMPHSVIDVVGLGHYEGTALDLGCGTGAVGRALQTGSQNRITRLVGVDMSNGMLDVCRRNGLYSELVYDRMEFFLARQTEMVDHIFCVSSLGFLPVEELDFVLVRCFQLAKQTITLVVEDNKGFVTSGNEQFGRLHDYWTDHSENIRTFQVPPGWHLCSPVEAALCHQEDRLQFRFERVDKAS

SEQ ID NO: 79 - protein, 241 aa, Hevea brasiliensis
MNSMAMATHLYTSYSPITTKTISSNNNSDKVLSLPLQPRHAISIASPSLSLRTTTRFSISAAAGTTAVQVDGPTTSNKGPKSLPFRVGHGFDLHRLEPGYPLIIGGINIPHERGCEAHSDGDVLLHCVVDAILGALGLPDIGQIFPDSDPKWKGAPSSVFIKEAVRLMHEAGYDIGNLDATLILQRPKLSPHKEAIRDNLCQLLGADPSVINLKAKTHEKVDSLGENRSIAAHTVVLLMKK

SEQ ID NO: 80 - protein, 238 aa, Hevea brasiliensis
MAMATHLYASYSPITTKTISSNNNSDKVLSLPLPPRHAISIASPSLSLRTTIRFSISAAAGTTAVQVDGPTTSNKGPKSLPFRVGHGFDLHRLEPGYPLIIGGINIPHERGCEAHSDGDVLLHCVVDAILGALGLPDIGQIFPDSDPKWKGAPSSVFIKEAVRLMHEAGYDIGNLDATLILQRPKLSPHKEVIRDNLCQLLGADPSVINLKAKTHEKVDSLGENRSIAAHTVVLLMKK

SEQ ID NO: 81 - protein, 238 aa, Hevea brasiliensis
MAMATHLYASYSPITTKTISSNNNSDKVLSLPLPPRHAISIASPSLSLRTTIRFSISAAAGTTAVQVDGPTTSNKGPKSLPFRVGHGFDLHRLEPGYPLIIGGINIPHERGCEAHSDGDVLLHCVVDAILGALGLPDIGQIFPDSDPKWKGAPSSVFIKEAVRLMHEAGYDIGNLDATLILQRPKLSPHKEAIRDNLCQLLGADPSVINLKAKTHEKVDSLGENRSIAAHTVVLLMKK

SEQ ID NO: 82 - protein, 237 aa, Hevea brasiliensis
MNSMAMATHLYTSYSPITSKTITTNYNSNKALSVPLHKSIASPSLSLRTTARLSISAAAGATALQVDGPPTSSKGPKSLPFRVGHGFDLHRLEPGYPLIIGGINIPHERGCEAHSDGDVLLHCVVDAILGALGLPDIGQIFPDSDPKWKGAPSSVFIKEAVRLMHEAGYDIGNLDATLILQRPKLSPHKEVIRDNLCQLLGADPSVINLKAKTHEKVDSLGENRSIAAHTVVLLMKK

SEQ ID NO: 83 - protein, 740 aa, Arabidopsis thaliana
MATGVLPAPVSGIKIPDSKVGFGKSMNLVRICDVRSLRSARRRVSVIRNSNQGSDLAELQPASEGSPLLVPRQKYCESLHKTVRRKTRTVMVGNVALGSEHPIRIQTMTTSDTKDITGTVDEVMRIADKGADIVRITVQGKKEADACFEIKDKLVQLNYNIPLVADIHFAPTVALRVAECFDKIRVNPGNFADRRAQFETIDYTEDEYQKELQHIEQVFTPLVEKCKKYGRAMRIGTNHGSLSDRIMSYYGDSPRGMVESAFEFARICRKLDYHNFVFSMKASNPVIMVQAYRLLVAEMYVHGWDYPLHLGVTEAGEGEDGRMKSAIGIGTLLQDGLGDTIRVSLTEPPEEEIDPCRRLANLGTKAAKLQQGAPFEEKHRHYFDFQRRTGDLPVQKEGEEVDYRNVLHRDGSVLMSISLDQLKAPELLYRSLATKLVVGMPFKDLATVDSILLRELPPVDDQVARLALKRLIDVSMGVIAPLSEQLTKPLPNAMVLVNLKELSGGAYKLLPEGTRLVVSLRGDEPYEELEILKNIDATMILHDVPFTEDKVSRVHAARRLFEFLSENSVNFPVIHHINFPTGIHRDELVIHAGTYAGGLLVDGLGDGVMLEAPDQDFDFLRNTSFNLLQGCRMRNTKTEYVSCPSCGRTLFDLQEISAEIREKTSHLPGVSIAIMGCIVNGPGEMADADFGYVGGSPGKIDLYVGKTVVKRGIAMTEATDALIGLIKEHGRWVDPPVADE

SEQ ID NO: 84 - protein, 656 aa, Parachlamydia acanthamoebae
MKYCTSHYQTIRRKTREVLIGNIGVGGNHPIRIQSMTTSSTRNVEATVDQIIRLADAGCEIVRMTVQGMKEAEACEHIKNDLVKKGYLIPLVADIHFYPPAAMGVADFVDKIRINPGNYVDKRANFKVIEYDDATYAAEIEKIEEKFTPLVEKCKRLKKAIRIGTNHGSLSDRIMNRYGDTPFGMVESALEFTRICRKNDFHDLIFSMKASNPLVMIQAYRLLVAEMEKLGWDYPLHLGVTEAGEGEDGRIKSAMGIGALLLDGIGDTIRVSLTEDPWNEVDPCQRLVHLAQNCQGQGVAPFQESHRSITEVKKREITFPPHVAMHRNGTVIVSVTSEMLKKTDFYQSLGCENQLGTIKIKTSTPDMIVINHPERDEKVLQMLNRMVKSGIGLASPYPLTHALVIQSLQEAMTSHQKQQQTARFAVGLPARPQPLAIDIDTDSEEEWKWLHDLKPEVIIFSPKEHRLHASRRFFEWIQNAKISTSVMLHFTYVSNKEDLIIQAAAEFGALLCDGLGEGIWIEAPHELDFLRQLSFNILQAARMRISKTDFISCPSCGRTLFDLQDVSRNIRNRTAHLPGVKIAIMGCIVNGPGEMADADFGYVGSKPGMIDLYLGKQCVEKDIPFSEAVDRLVELIKRHGRWVEPDEIEAVICQSE

SEQ ID NO: 85 - protein, 654 aa, Protochlamydia amoebophila
MVQKKYCEAIHQTERRPTRIVNVGNVGIGGNHPIRIQSMTTSSTRDVEATIEQVIRLADQGCEIVRVTVQGIKEADACEHIKKGLIKRGYQIPLVADIHFYPPAAMRVVDFVDKVRINPGNFVDKRASFKQIVYDDESYAREIERIEEKFTPLVEKCKRLNRAMRIGTNHGSLSDRIMNRYGDTPFGMVESALEFARICRKNDYHNFLFSMKASNPQVMIQAYRLLTQAMYALEWDYPLHLGVTEAGEGEDGRIKSAMGIGSLLIDGIGDTIRVSLTEDPWHEINPCQRLIKLASAYQQQGVAPFIENYRQIEAIERRQVHLSSTVPMHRDGTVFISLPINMLKEASLYQQIGCEGPFGKPKLKTATADNLVLKNPNSDSEEKRQLQILKDLGIGLFSKDPFEMSLVIHPLKKWLQSRAVDSFASRFSSSWAKSAGQPLIIQITDETEKEWKEVISLKPQLIILSPSTNRLHYSRQFFEWLQQNQLNYPVILNFTYQGENEDTILLASMECGSLLCDGLGEGVWLEGPYDILFLRQLSFSILQAARLRMSKTDFISCPSCGRTLFNLQDVTKRIQSRTSHLPGVKIAIMGCIVNGPGEMADADFGYVGSKPGKIDLYVGKECVEKDIDFADADDRLVNLIRAHGRWIEPQTVNA

SEQ ID NO: 86 - protein, 604 aa, Simkania negevensis
MRYSEAIYQTKRWKTREVKVGKVGVGGNNPIRIQSMTTSDTRDVEATANQIMRLADTGCEIARVTVQGKKEAEACEGIKNTLVQKGYDIPVVADIHFYPPAAMLVVDYVDKVRVNPGNFVDRRATFRTIEYDDASYEAELRKIDETFGPLVEKCKKLKRAMRIGTNHGSLSDRIMNRYGDTPFGMVESALEFARVCRKLGYHDFMFSMKASNPLVMMQAYRLLVHEMMKLGWNYPLHLGVTEAGDGEDGRVKSAVGIGSLLLDGLGDTIRVSLTEDPWAEIDPCKRLIRLAESYEGKGTLPFIETKRNVAAIERRYVRQTSPLHRDGSVILNLESPSTDLGTKEGKVDAVYMEKYEPLKDDVTILTRTPNVSGALLVKDLEEFDETAQVAWVKDGDPSSWNRLLEHPVKMILLELTESPIHQGRYFFDWIQQSKLDIPVILVVSYDLSEEDTVIHAAAELGALLGDGYGEGILLRTRLTPGQNRSLSFNILQACRLRASKTEFIACPGCGRTLFDLQEVTKRIRLKTSHLPGVKIAIMGCIVNGPGEMADADFGYVGSRAGKVDLYVGKECVERNIDFDAADERLIELIKAHDRWIEIEEPALL

SEQ ID NO: 87 - protein, 570 aa, Melampsora larici-populina
MIGNLITDLWAAGGLCDILDYRGGDLLNPPANTSQSSGSSRGGSSASTLRGLNNHESLITPKKLGEVLAPTSQRLDRSILRSNSGESVPGLESRRRPKVKALTTSLAKTPRDATATPAPENQKRLCTQSPTEFEQPLLQSTSNNPTQSDDPLSHFQPTTGEPVANFRALADEERNFIDRMTSSADLDAKHSDYARELGEVNGDNYRHLALCGNIARTQFYLCRISQQVSTLAEQVAEQFGILHQDLTDKMNVISANVDDLSEAVQSGGLKPAPTATSTSTSTSTSTSTSTLASAASAKAARTATVSEWKASRQLKALLNELSVQLIPEADLQSYTEIEDRAKNYLPRSLFNRVRLRVAKQDAEWIALHLPKQIRGVNDGEGLRKYATAIRDSGKHAREKLHLLLLTNVHNQKHGAVKGVAVPTLIALWHRIALKCGLIGGDVDAITAWRAADEVTRSRIAYLRREATRLRQTPSATNIWSAVDKQLDLLRDKEKDLPDYTTSFYDIIYQNDNEIFNGKRSWSEIKENYVLALPTEDAIVAGTSGVVEEAVPPLGGKGDGEDVGSEHEDSI

SEQ ID NO: 88 - protein, 429 aa, Kluyveromyces lactis
MLKISAALFLTIAVAFVNGINIEVSEYDREIQVKNQNELKSTSNNALCKKDQHIIENQNDLYQLSNECPTIDGSISFQNYVEPHINLGNIKTINGNFILEENNEVVSIQGDALEKIGGTFKLYDLTSLNAVNFPHLHDLNVVHWRVVPILGSVAMDNNIDSIKSLVISDSSLTSLRGFDKIAKLDTFNINNNRYLESIATNVKYISKQLSVSANADELNLDMSELIWANNVTIRDTKEINLEHLQYVNQSLEFIENKVNKLELSELKSVGGTLGIIENKHLSKADFNNVSQISGGLMIAGNDALEKIGFFKSLKLIGGAIQFKGNIKDTDFPNLRLVKGSAIIQSTSDELDCSKWVTPNSGSSIIRGGKIECEPKGKKSSANVRQDGTVLDRTTTTESAEAKETNGSTIMGANFLLLALAVLGTVRILG

SEQ ID NO: 89 - protein, 740 aa, Hevea brasiliensis
MATGAVPASFTGLKTRDSSLGFGKSMDFVRVCDLKRIKSGRKKISMIRNSNPGPEMVELQPASEGSPLLVPRQKYCESVHKTVRRKTRTVMVGNVALGSEHPIRVQTMTTSDTKDVAGTVEQVMRIADQGADLVRITVQGKREADACFEIKNSLVQKNYNIPLVADIHFAPSVALRVAECFDKIRVNPGNFADRRAQFEKLEYTEDDYQKELEHIEQVFTPLVEKCKKYGRAMRIGTNHGSLSDRIMSYYGDSPRGMVESAFEFARICRKLDFHNFVFSMKASNPVIMVQAYRLLVAEMYVQGWDYPLHLGVTEAGEGEDGRMKSAIGIGTLLQDGLGDTIRVSLTEPPEKEIDPCRRLANLGMRASTVQQGVAPFEEKHRHYFDFQRRSGQLPVQKEGEEVDYRGVLHRDGSVLMSVCLDQLKAPELLYKSLAAKLVVGMPFKDLATVDSILLRELPPVEDNDARLALKRLIDISMGVIVPLSEQLTKPLPNAMVLVNLKELSTGAHKLLPEGTRLVVSARGDEPYEELEILKDIDATMILHDLPFTEDKIGRVHAARRLFEFLSDNALNFPVIHHIQFPNAIHRDDLVIGAGTNAGALLVDGLGDGILLEAPDQDFDFLRNTSFNLLQGCRMRNTKTEYVSCPSCGRTLFDLQDISAEIREKTSHLPGVSIAIMGCIVNGPGEMADADFGYVGGAPGKIDLYVGKTVVKRGIAMEGATDALIQLIKDHGRWVDPPAEE

SEQ ID NO: 90 - protein, 466 aa, Arabidopsis thaliana
MAVALQFSRLCVRPDTFVRENHLSGSGSLRRRKALSVRCSSGDENAPSPSVVMDSDFDAKVFRKNLTRSDNYNRKGFGHKEETLKLMNREYTSDILETLKTNGYTYSWGDVTVKLAKAYGFCWGVERAVQIAYEARKQFPEERLWITNEIIHNPTVNKRLEDMDVKIIPVEDSKKQFDVVEKDDVVILPAFGAGVDEMYVLNDKKVQIVDTTCPWVTKVWNTVEKHKKGEYTSVIHGKYNHEETIATASFAGKYIIVKNMKEANYVCDYILGGQYDGSSSTKEEFMEKFKYAISKGFDPDNDLVKVGIANQTTMLKGETEEIGRLLETTMMRKYGVENVSGHFISFNTICDATQERQDAIYELVEEKIDLMLVVGGWNSSNTSHLQEISEARGIPSYWIDSEKRIGPGNKIAYKLHYGELVEKENFLPKGPITIGVTSGASTPDKVVEDALVKVFDIKREELLQLA

SEQ ID NO: 91 - protein, 402 aa, Cyanothece sp. (strain ATCC 51142)
MDTKAFKRSLQQSNNYHRKGFGHETEVMGTMNTEYQSSLIQKIRENNYQWQEGDVTIKLAEAFGFCWGVERAVAMAYETRQHFPQEKIWITNEIIHNPSVNQRLLEMNVGFIEVINGSKDFSVVEAGDVVILPAFGASVTEMQLLNDKGCTIVDTTCPWVSKVWNSVEKHKKKDYTSIIHGKYKHEETVATSSFAGTYLVVLNLKEAQYVCDYILNGGNKDEFLEKFKNAHSEGFDPDKDLIRLGIANQTTMLKSETEQIGKLFETTMLKKYGPTELNEHFMSFNTICDATQERQDAMLNLVEEEVDVMVVIGGFNSSNTTHLQEISIEKGIDSYHIDSDKRILPGNKIEHKPLEKDIETKENWLPDGKIIVGVTSGASTPDKVVEAVIERIFEEKNAGVLV

SEQ ID NO: 92 - protein, 397 aa, Oscillatoria sp. PCC 6506
MDTKAFKRSLQQSENYHRKGFGHEDEVAEVMQSAYQSSLIQQIRENNYTLQRGDVTIRLAQAFGFCWGVERAVAIAYETRQHFPTERIWITNEIIHNPSVNQHLVDMQVEFIPVEKSEKDFSVVDRGDVVILPAFGASVQEMQTLNDKGCKIVDTTCPWVSKVWNTVEKHKKKVCTSIIHGKYNHEETVATSSFAGKYLIVLNLREAEYVCNYILNGGDREEFLAKFSKACSAGFDPDRDLEQVGIANQTTMLKSETEQIGKLFEKTMMRKYGPDKLNEHFQSFNTICDATQERQDAMFSLVEEKLDLMLVIGGFNSSNTTHLQEMAVERKLPSYHIDAAERILANNRIEHKPLGSDLAIADNWLPTGKIVVGVTSGASTPDKVVEDAIKRIFEMKA

SEQ ID NO: 93 - protein, 402 aa, Microcystis aeruginosa
MDTKSFKRTLQQSDNYNRKGFGHKEEVMDAMTNEYQSDLIQEIRENNYRLQRGDVTIYLAQAFGFCWGVERAVAMAYETRQHFPQERIWITNEIIHNPSVNQRLRSMAVGFIPVENGQKDFTVVESGDVVILPAFGASVSEMQILNDKGCMIVDTTCPWVSKVWNSVEKHKKSDHTSIIHGKYNHEETIATSSFAGTYLIVLNLDQANYVANYILHGGDKNEFLEKFKNAHSQGFDPDRDLDYIGIANQTTMLKSETEEIGKLFEHTMLRKYGPIDFKDHFMSFNTICDATQERQDAIFELVKEPLSLMVVIGGYNSSNTTHLQEIAIERAIPSYHIDSAERILPGNRIEHKPLGDDLIITDNWLNEGKIVVGVTSGASTPDKVVEEVIEKIFAFKSSLVPG

SEQ ID NO: 94 - protein, 1056 aa, Candida albicans
MTSASLENRVSRLNIYRTTSNTTSQVSLKHDYIDSPFSGKKDQFDQVLDVLDSTGFIPESLIESEAKWFYESLGIDDVFFARSSPEDIASHIHALYSCKVQAYSSFGEQPLISYKREAEDHAVFFDTVDAESYKRNQFEERIDDKYIDPSSTTTNSYRTEYFSAPLNYQSDPILSGVYQQNKELRDQYVRLFFVYKNNYTISEAAANETDLEKIGDKTFLKIASDNTKQLYTSIVKDVINTTGPVIKHFPLEDSEEYRVVIGYKQKTSARYNSALSDLANYYKLQVTRKYVEQFSNGVTIISMYVTSKSRKSPVDLSIYQVIKEASLLYCIPHNYFHDRFIQGELSLQESIYAQSGVIFVTHFLNRLGPEYNKLFSLLDPSKSIEHAEVLNSLKKRLRAETYTQDYIKEVFDNRRDIVRKLYRQFADVHYIRSSMEKTLSYQRLSQITPVGSEEEFEQLLSRECSQNEHHAIVLRALYTFNKSILKTNFYTSTKVALSFRLNPSFLPESEYPERPYGMFFVVGSDFRGFHIRFRDIARGGIRIVRSRSLDAYNVNARNLFDENYNLANTQQRKNKDIPEGGSKGVILLDPGAAQERPQACFEKYIDALIDLLLKQNIPGVKDNYVDLYAKPEILFLGPDEGTAGYVDWATLHARERGAPWWKSFLTGKSPELGGIPHDEYGMTTLSVRAYVNKIYEKLDIDDAKIRKFQTGGPDGDLGSNEILLSRKENYVGIVDGSGVICDPQGLDKQELIRLAKERKMIEHYDKTKLSPQGYVVLVDDMDVKLPSGEVVTSGVAFRNTFHLKLKQQFGVDGVDLFVPCGGRPAAIDTNNVHDLIDEKTGKSVVPYFVEGANLFITQSAKLILEKAGIVIFKDASTNKGGVTSSSLEVLASLSFDDKGFLENMCVDPETKAKPQFYQDYVKDVQKIIVGNADSEFEALWKLKAETGTPFTILSDKLSVAINKLGDELANSKELWNDDIEFRNAVLLDSLPPLLLEKVGIENVLSRVPEAYLKAIFATHLASKFVYSRGIDSNPAKFLEFISSIRKDFIQKGLLKY

SEQ ID NO: 95 - protein, 1794 aa, Schizosaccharomyces pombe
MSYPNQMNGSMYGYGANNGVQPGFDSYGMPINQGGMNYQQQTYPYQQPYQPDGYAGNTMLPFQQSQPATQFNNGFGYASQPTGSVADYGQQQQQMYGYNGMMPQTMNNTGFMQPQQTGAIPGFAPQPTGFVQPQPTGFMSQQPASFMQPQRTGGAGFIQPQRTGAMPAYQPQMNNFMQPQKTGGFAPQATGFMQTQPFGAAPSFAPQPTGFVQPQQTGVVMPPQPTGYLQAQPTGPFASFVQPQQTASFMPAAQPLKPQKTGQIHNSKAMDTRLSFVSAADQAKFEQLFKSAVGREEAMSSEIGKAILVRSKLPTVQLSKIWRLSDTTRSGRLLFPQFVLAMYLCNLGLTGKPIPDKVPDGILNEVNAMVDAISFSLDENYAKPTQPIPQAAAQQMAAQMFGGFQQAAGIPSQITGFQPQAMMPQRTGMQPQMTGFQQPMIPQRTGMQPQMTGFQQPMMPQRTGLQPQMTGFQQPMVPQRTGMQPQMTGFQQPMMPQRTGLQPQMTGFQQPMVPQRTGMQPMMPGLQQPMAPQRTGMQPMMPQRTGMQPQMTGFQQPMAPQRTGMQPMMPQRTGMQPQMPGMQQPMAPQRTGMQPMMPQRTGMQQPMAPQRTGMQPMMPQRTGMQPQMPGMQQPMAPQRTGMQPMMPQRTGMQPQMPGMQQPMAPQRTGMQPMAPQRTGMQPMMPQRTGMQPQMPGMQQPMAPQRTGMQPMMPQRTGMQPQMPGMQQPMAPQRTGMQPMAPQRTGMQPQMTGGPMLPQRTGGMAPQPTGMPGQWGFINTPLSNLPGIEALGQQMMPNAPSGGLNNTFQQKKDIPWAISKEEKRIYDQIFDAWDKERKGTLGGNAVLEIFGQSKLTRTELEHIWNLCDHGDKGSLDRDEFAVALHLIYRKLNGNEVPAVLPPELIPPSTRNFTESLNQVKNLIKNDTSNRKPFGAENQSKLKKNSFYDNPSETTEKDATLYRHNDSDASAYVSSARRRDFKEEKIESAPPIINDIDSEIASLKKRIHEKSLVVNALEDKKLAATPANDVQNDSLIYRIKSVQDEINRLSTSNKSPEVASMNVRLEELSTRVSKMLSDINEVDHTIASLSLKLFQAEDTKNSYDQTSPEATQERNRTISSKLAEMEKQKNESKAALEQMKNYVTNIENNIRAKLLPSAANDDAWLSQNVVDESVTRVVKELPVPAPAAPQTLNPPSVSTVQQSKPIESNTHTPEVKATSESPSASSNLEDRAARIKAEAQRRMNERLAALGIKPRQKGTPSPAPVNSATSTPVAAPTAQQIQPGKQASAVSSNVPAVSASISTPPAVVPTVQHPQPTKQIPTAAVKDPSTTSTSFNTAPIPQQAPLENQFSKMSLEPPVRPAVPTSPKPQIPDSSNVHAPPPPVQPMNAMPSHNAVNARPSAPERRDSFGSVSSGSNVSSIEDETSTMPLKASQPTNPGAPSNHAPQVVPPAPMHAVAPVQPKAPGMVTNAPAPSSAPAPPAPVSQLPPAVPNVPVPSMIPSVAQQPPSSVAPATAPSSTLPPSQSSFAHVPSPAPPAPQHPSAAALSSAPADNSMPHRSSPYAPQEPVQKPQAINNIAPATNLGTSQSFSPRMGPVNNSGSPLAMNAAGQPSLAVPAVPSAPSNHFNPFAKMQPPAPSPLQPSGHDSDNWSQHGDEEEEDSEDDIRSSKDAAALAAKLFGGMAPAHPVSTPPVRPQSAAPPQMSAPTPPPPPMSVPPPPSAPPMPAGPPSAPPPPLPASSAPSVPNPGDRSALLQQIHTGTRLKKTVTTDKSKPIAGRVLDASDGNSSAWYGNLS

SEQ ID NO: 96 - protein, 462 aa, Hevea brasiliensis
MAVSLQLCRVSLRSDLFSRENLAPLNRRKFLSVRCAAGGDESSAGSVAVESDFDAKVFRHNLTRSKNYNRRGFGHKEETLELMNQEYTSDIIKTLKENGNQYKWGNVTIKLAEAYGFCWGVERAVQIAYEARKQFPDEKIWITNEIIHNPTVNKRLEEMNVQNIPVGEGKKHFEVVDSGDVVILPAFGAAVEEMLTLSNKNVQIVDTTCPWVSKVWNTVEKHKKGEYTSIIHGKYSHEETIATASFAGKHIIVKNMEEAMYVCDYILGGQLNGSSSTKEAFLEKFKYAVSKGFDPDVDLDKVGIANQTTMLKGETEEIGKLVEKTMMRKYGVENVNDHFISFNTICDATQERQDAMFKLVEEKLDLILVVGGWNSSNTSHLQEIAELRGIPSYWIDSEQRIGPGNKIAYKLNHGELVEKENFLPEGPITIGITSGASTPDKVVEDVLVKVFDIKRDEALQVA

SEQ ID NO: 97 - protein, 462 aa, Hevea brasiliensis
MAVSLQLCRVSLRSELFSRENLAPLNRRRFLSVRCAAGGDESSAGSVAVESDFDAKVFRHNLTRSKNYNRRGFGHKEETLELMNQEYTSDIIKTLKENGNQYTWGDVTIKLAEAYGFCWGVERAVQIAYEARKQFPDEKIWITNEIIHNPTVNKRLEEMNVQNIPVGEGKKHFEVVDSGDVVILPAFGAAVEEMLTLSNKNVQIVDTTCPWVSKVWNTVEKHKKGEYTSIIHGKYSHEETIATASFAGKHIIVKNMEEAMYVCDYILGGQLNGSSSTKEAFLEKFKYAVSKGFDPDVDLDKAGVANQTTMLKGETEEIGKLVEKTMMRKYGVENVNDHFISFNTICDATQERQDAMFKLVEEKLDLILVVGGWNSSNTSHLQEIAELRGIPSYWIDSEQRIGPGNKIAYKLNHGELVEKENFLPEGPITIGITSGASTPDKVVEDVLVKVFDIKRDEALQVA

SEQ ID NO: 98 - protein, 291 aa, Artemisia annua
MSTASLFSFPSFHLRSLLPSLSSSSSSSSSRFAPPRLSPIRSPAPRTQLSVRAFSAVTMTDSNDAGMDAVQRRLMFEDECILVDENDRVVGHDTKYNCHLMEKIEAENLLHRAFSVFLFNSKYELLLQQRSKTKVTFPLVWTNTCCSHPLYRESELIEENVLGVRNAAQRKLFDELGIVAEDVPVDEFTPLGRMLYKAPSDGKWGEHEVDYLLFIVRDVKLQPNPDEVAEIKYVSREELKELVKKADAGDEAVKLSPWFRLVVDNFLMKWWDHVEKGTITEAADMKTIHKL

SEQ ID NO: 99 - protein, 284 aa, Artemisia annua
MAETLVSKCSSQFTKLSSFSLTSSSSNLYQRQFVTFKPRSSFAASVSSSTTILTDADSNMDAVQRRLMFEDECILVDANDAVVGHDTKYNCHLMEKIQSENLLHRAFSVFLFNSKYELLLQQRSATKVTFPLVWTNTCCSHPLYRESELIEENYLGVRNAAQRKLLDELGIPSDELPVNEFIPLGRILYKAPSDGKWGEHELDYLLFIVRDVSMAPNPDEVAEVKYVNREQLKELVMKADLGEEGLKLSPWFRIVVDNFLFKWWDHVENGSLLEACDMKTIHNL

SEQ ID NO: 100 - protein, 234 aa, Hevea brasiliensis
MGDAPDTGMDAVQRRLMFEDECILVDENDRAVGHASKYSCHLWENILKGNSLHRAFSVFLFNSKYELLLQQRSATKVTFPLVWTNTCCSHPLYRESERIDEDALGVRNAAQRKLLDELGIPAEDVPVDQFTPLGRMLYKAPSDGKWGEHELDYLLFIVRDVNVNPNPDEVADIKYVNRDELKELLKKADAGEEGLKLSPWFRLVVDNFLFKWWEHVEKGTLKEAADMKTIHKLT

SEQ ID NO: 101 - protein, 306 aa, Hevea brasiliensis
MSLTTRLLNAHATTRLSSSLPSSASPRYSHFLSTQFASPSLIQFPLTLKPSSTSSFSRVFSSSSSAITATSTMGEAPDVGMDAVQKRLMFDDECILVDENDGVVGHASKYNCHLWENILKGNALHRAFSVFLFNSKYELLLQQRSGTKVTFPLVWTNTCCSHPLYRESELIDEDALGVRNAAQRKLFDELGIPAEDVPVDQFTPLGRILYKASSDGKWGEHELDYLLFIVRDVNVNPNPDEVADVKYVNRDQLKELLRKADSGEEGINLSPWFRLVVDNFLLKWWENVENGTLKEAVDMKTIHKLS

SEQ ID NO: 102 - protein, 284 aa, Artemisia annua
MSASSLFNLPLIRLRSLALSSSFSSFRFAHRPLSSISPRKLPNFRAFSGTAMTDTKDAGMDAVQRRLMFEDECILVDETDRVVGHDSKYNCHLMENIEAKNLLHRAFSVFLFNSKYELLLQQRSNTKVTFPLVWTNTCCSHPLYRESELIQDNALGVRNAAQRKLLDELGIVAEDVPVDEFTPLGRMLYKAPSDGKWGEHELDYLLFIVRDVKVQPNPDEVAEIKYVSREELKELVKKADAGEEGLKLSPWFRLVVDNFLMKWWDHVEKGTLVEAIDMKTIHKL

SEQ ID NO: 103 - protein, 234 aa, Hevea brasiliensis; identical to SEQ ID NO: 100

SEQ ID NO: 104 - protein, 284 aa, Artemisia annua; identical to SEQ ID NO: 99

SEQ ID NO: 105 - protein, 306 aa, Hevea brasiliensis; identical to SEQ ID NO: 101

SEQ ID NO: 106 - protein, 234 aa, Hevea brasiliensis
MGEAPDVGMDAVQKRLMFDDECILVDENDGVVGHASKYNCHLWENILKGNALHRAFSVFLFNSKYELLLQQRSGTKVTFPLVWTNTCCSHPLYRESELIDEDALGVRNAAQRKLFDELGIPAEDVPVDQFTPLGRILYKASSDGKWGEHELDYLLFIVRDVNVNPNPDEVADVKYVNRDQLKELLRKADSGEEGINLSPWFRLVVDNFLLKWWENVENGTLKEAVDMKTIHKLS

SEQ ID NO: 107 - protein, 352 aa, Artemisia annua
MASEKEIRRERFLNVFPKLVEELNASLLAYGMPKEACDWYAHSLNYNTPGGKLNRGLSVVDTYAILSNKTVEQLGQEEYEKVAILGWCIELLQAYFLVADDMMDKSITRRGQPCWYKVPEVGEIAINDAFMLEAAIYKLLKSHFRNEKYYIDITELFHEVTFQTELGQLMDLITAPEDKVDLSKFSLKKHSFIVTFKTAYYSFYLPVALAMYVAGITDEKDLKQARDVLIPLGEYFQIQDDYLDCFGTPEQIGKIGTDIQDNKCSWVINKALELASAEQRKTLDENYGKKDSVAEAKCKKIFNDLKIEQLYHEYEESIAKDLKAKISQVDESRGFKADVLTAFLNKVYKRSK

SEQ ID NO: 108 - protein, 342 aa, Hevea brasiliensis
MADLKSTFLKVYSVLKQELLEDPAFEWTPDSRQWVERMLDYNVPGGKLNRGLSVIDSYKLLKEGQELTEEEIFLASALGWCIEWLQAYFLVLDDIMDSSHTRRGQPCWFRVPKVGLIAANDGILLRNHIPRILKKHFRGKAYYVDLLDLFNEVEFQTASGQMIDLITTLEGEKDLSKYTLSLHRRIVQYKTAYYSFYLPVACALLIAGENLDNHIVVKDILVQMGIYFQVQDDYLDCFGDPETIGKIGTDIEDFKCSWLVVKALELCNEEQKKVLYEHYGKADPASVAKVKVLYNELKLQGVFTEYENESYKKLVTSIEAHPSKPVQAVLKSFLAKIYKRQK

SEQ ID NO: 109 - protein, 342 aa, Hevea brasiliensis
MADLKSTFLKVYSVLKQELLEDPAFEWTPDSRQWVERMLDYNVPGGKLNRGLSVIDSYKLLKEGQELTEEEIFLASALGWCIEWLQAYFLVLDDIMDSSHTRRGQPCWFRVPKVGLIAANDGILLRNHIPRILKKHFRGKAYYVDLLDLFNEVEFQTASGQIIDLITTLEGEKDLSKYTLSLHRRIVQYKTAYYSFYLPVACALLIAGENLDNHIVVKDILVQMGIYFQVQDDYLDCFGDPETIGKIGTDIEDFECSWLVVKALELCNEEQKKVLYEHYGKADPASVAKVKVLYNELKLQGVFTEYENESYKKLATSIEAHPSKPVQAVLKSFLAKIYKRQK

SEQ ID NO: 110 - protein, 343 aa, Artemisia annua
MSSTDLKSKFLKVYDTLKSELINDPAFEFDDDSRQWIEKMLDYNVPGGKLNRGLSVVDSYQLLKGGELSDDEIFLSSALGWCIEWLQAYFLVLDDIMDESHTRRGQPCWFRLPKVGMIAANDGILLRNHVPRILKKHFRGKPYYVDLVDLFNEVEFQTASGQMIDLITTLVGEKDLSKYSLSIHRRIVQYKTAYYSFYLPVACALLMFGEDLDKHVEVKNVLVEMGTYFQVQDDYLDCFGAPEVIGKIGTDIEDFKCSWLVVKALELPNEEQKKTLHENYGKKDPASVAKVKEVYHTLNLQAVFEDYEATSYKKLITSIENHPSKAVQAVLKSFLGKIYKRQK

SEQ ID NO: 111 - protein, 343 aa, Artemisia annua
MSSIDLKSKFLKVYDTLKSELINDPAFEFDDDSRQWIEKMLDYNVPGGKLNRGLSVVDSYQLLKGGELSDDEIFLSSALGWCIEWLQAYFLVLDDIMDESHTRRGQPCWFRLLKVGMIAANDGILLRNHVPRILKKHFRGKPYYVDLVDLFNEVEFQTASGQMIDLITTLVGEKDLSKYSLSIHRRIVQYKTAYYSFYLPVACALLMFGEDLDKHVEVKNMLVEMGTYFQVQDDYLDCFGAPEVIGKIGTDIEDFKCSWLVVKALELANEEQKKVLHENYGKKDPASVAKVKEVYHTLNLQAVFEDYEATSYKKLITSIENRPSKAVQAVLKSFLGKIYKRQK

SEQ ID NO: 112 - protein, 574 aa, Artemisia annua
MDTLPISSVSFSSSTSPLVVDDKVSTKPDVIRHTMNFNASIWGDQFLTYDEPEDLVMKKQLVEELKEEVKKELITIKGSNEPMQHVKLIELIDAVQRLGIAYHFEEEIEEALQHIHVTYGEQWVDKENLQSISLWFRLLRQQGFNVSSGVFKDFMDEKGKFKESLCNDAQGILALYEAAFMRVEDETILDNALEFTKVHLDIIAKDPSCDSSLRTQIHQALKQPLRRRLARIEALHYMPIYQQETSHDEVLLKLAKLDFSVLQSMHKKELSHICKWWKDLDLQNKLPYVRDRVVEGYFWILSIYYEPQHARTRMFLMKTCMWLVVLDDTFDNYGTYEELEIFTQAVERWSISCLDMLPEYMKLIYQELVNLHVEMEESLEKEGKTYQIHYVKEMAKELVRNYLVEARWLKEGYMPTLEEYMSVSMVTGTYGLMIARSYVGRGDIVTEDTFKWVSSYPPIIKASCVIVRLMDDIVSHKEEQERGHVASSIECYSKESGASEEEACEYISRKVEDAWKVINRESLRPTAVPFPLLMPAINLARMCEVLYSVNDGFTHAEGDMKSYMKSFFVHPMVV

SEQ ID NO: 113 - protein, 574 aa, Artemisia annua
MSTLPISSVSFSSSTSPLVVDDKVSTKQDVIRHTMNFNASIWGDQFLTYDEPEDLVMKKQLVEELKEEVKKELITIKGSNEPMQHVKLLELIDAVQRLGIAYHFEEEIEEALQHIHVTYGEQWVDKENLQSISLWFRLLRQQGFNVSSGVFKDFMDEKGKFKESLCNDAQGILALYEAAFMRVEDETILDNALEFTKVHLDIIAKDPSCDSSLRTQIHQALKQPLRRRLARIEALHYMPIYQQETSHNEVLLKLAKLDFSVLQSMHKKELSHICKWWKDLDLQNKLPYVRDRVVEGYFWILSIYYEPQHARTRMFLMKTCMWLVVLDDTFDNYGTYEELEIFTQAVERWSISCLDMLPEYMKLIYQELVNLHVEMEESLEKEGKTYQIHYVKEMAKELVRNYLVEARWLKEGYMPTLEEYMSVSMVTGTYGLMIARSYVGRGDIVTEDTFKWVSSYPPIIKASCVIVRLMDDIVSHKEEQERGHVASSIECYSKESGASEEEACEYISGKVEDAWKVINRESLRPTAVPFPLLMPAINLARMCEVLYSVNDGFTHAEGDMKSYMKSFFVHPMVV

SEQ ID NO: 114 - protein, 573 aa, Artemisia annua
MSTFLVCNASFSPSYGLPSSCDRNSSMNQEIVRNTVKFPPSIWGDQFLTYHEPKKSLTIEKQHVEEVEEIRKKLLNTAFSEPKQHTKLIHLIDSVQRLGVSYHFEQEIEEALQHVYATHGDQWIGKDNLKSTSQWFRILRQQGFNVSSGIFENHMDDKGKFKEHLSDDVQGMLGLYEAAYMSVEGEKELDDALEFTKTHLGNIAKDPSQNASLRTKIEQALNRPLRKRMPRLEALHYIPKYQQEASHDETLLNLAKLDYNMLQSIHKREISEICKWWKDLDFSNKLPHVRDRLVEIYFWVLGVYFEPQHYRSRMFLTKTSMWLIVLDDTYDNYGTYEELKIFTEAVQRWSLSCLDSLPEYMKLIYRELINHYQEMEESVEKEGKSYQLFYAKEMVKENCRNLLVEAKWLKEGYVPTLEEHMSVSCVTYAYAVMIANSYVGRENMVTEESFKWVAKFPPLVNATCLILRLMDDIAGHEEEQERDHVVSSIECYRNETGASEEDAVKFLSKQVEDAWKVINKECLRPTEIPMSLTIPPLSLARVSDILYKTNNGYNHAGEEVISYIKSLLVHPLV

SEQ ID NO: 115 - protein, 548 aa, Artemisia annua
MSVKEEKVIRPIVHFPPSVWADQFLIFDDKQAEQANVEQVVNELREDVRKDLVSSLDVQTEHTNLLKLIDAIQRLGIAYHFEEEIEQALQHIYDTYGDDWKGRSPSLWFRILRQQGFYVSCDIFKNYKKEDGSFKESLTNDVEGLLELYEATYLRVQGEGVLDDALVFTRTCLEKIAKDLVHTNPTLSTYIQEALKQPLHKRLTRLEALRYIPMYEQQASHNESLLKLAKLGFNLLQSLHRKELSEVSRWWKGLDVPNNLPYARDRMVECYFWALGVYFEPKYSQARIFLAKVISLATVLDDTYDAYGTYEELKIFTEAIQRWSITCIDMLPEYLKLLYQGVLDIYIEMEEIMGKEGKAHHLSYAKESMKEFIRSYMMEAKWANEGYVPTAEEHMSVAFVSSGYSMLATTCFVGMGDIVTDEAFKWALTKPPIIKASCAIARLMDDIHSQKEEKERIHVASSVESYMKQYDVTEEHVLKVFNKKIEDAWKDITRESLVRKDIPMPLMMRVINLAQVMDVLYKHKDGFTNVGEELKDHIKSLLVHPIPI

SEQ ID NO: 116 - protein, 580 aa, Picea abies
MDLAVEIAMDLAVDDVERRVGDYHSNLWDDDFIQSLSTPYGASSYRERAERLVGEVKEMFTSISIEDGELTSDLLQRLWMVDNVERLGISRHFENEIKAAIDYVYSYWSDKGIVRGRDSAVPDLNSIALGFRTLRLHGYTVSSDVFKVFQDRKGEFACSAIPTEGDIKGVLNLLRASYIAFPGEKVMEKAQTFAATYLKEALQKIQVSSLSREIEYVLEYGWLTNFPRLEARNYIDVFGEEICPYFKKPCIMVDKLLELAKLEFNLFHSLQQTELKHVSRWWKDSGFSQLTFTRHRHVEFYTLASCIAIEPKHSAFRLGFAKVCYLGIVLDDIYDTFGKMKELELFTAAIKRWDPSTTECLPEYMKGVYMAFYNCVNELALQAEKTQGRDMLNYARKAWEALFDAFLEEAKWISSGYLPTFEEYLENGKVSFGYRAATLQPILTLDIPLPLHILQQIDFPSRFNDLASSILRLRGDICGYQAERSRGEEASSISCYMKDNPGSTEEDALSHINAMISDNINELNWELLKPNSNVPISSKKHAFDILRAFYHLYKYRDGFSIAKIETKNLVMRTVLEPVPM

SEQ ID NO: 117 - protein, 582 aa, Artemisia annua
MASMCTFSSPFLLCNSSISRTNIVACNKQTSTLQAQVKNVATIETTNRRSANYAPSLWSYDFVQSLSSKYKGDNYMARSRALKGVVRTMILEANGIENPLSLLNLVDDLQRLGISYHFLDEISNVLEKIYLNFYKSPEKWTNMDLNLRSLGFRLLRQHGYHIPQEIFKDFIDVNGNFKGDIISMLNLYEASYHSVEEESILDDAREFTTKYLKETLENIEDQNIALFISHALVFPLHWMVPRVETSWFIEVYPKKVGMNPTVLEFAKLDFNILQAVHQEDMKKASRWWKETCWEKFGFARDRLVENFMWTVAENYLPHFQTGRGVLTKVNAMITTIDDVYDVYGTLPELELFTNIVNSWDINAIDELPDYLKICFLACYNATNELSYNTLTNKGFFVHPYLKKAWQDLCNSYIIEAKWFNDGYTPTFNEFIENAYMSIGIAPIIRHAYLLTLTSVTEEALQHIERAESMIRNACLIVRLTNDMGTSSDELERGDIPKSIQCYMHESGATEMEARAYIKQFIVETWKKLNKERQEIGSEFPQEFVDCVINLPRMGHFMYTDGDKHGKPDMFKPYVFSLFVNPI

SEQ ID NO: 118 - DNA, 1227 bp, Artificial Sequence
  synthetic sequence
ggatccgagctcatgtcgcaaaatgtttatatcgtttcaactgcccgcactccaatcggttcctttcagggttctctgtcgtccaagactgctgtcgaacttggtgcagttgcccttaagggagctttggcgaaggtgcccgagctggacgcctccaaggacttcgatgaaatcatttttggtaacgtgctcagcgctaatctgggacaagcaccagcaagacaggtcgcacttgcagctggattgtctaaccacatcgttgcatcaacggttaataaggtgtgcgctagcgcgatgaaggctatcattctcggcgcgcaatctattaagtgcgggaacgcagatgtggtcgttgccggcgggtgtgagtccatgaccaatgcgccatactatatgccagcagcaagagcaggagcaaagttcgggcagacagttctcgtggacggcgtcgagagagatgggctcaacgacgcttacgatggtctggcgatgggagtgcacgcagaaaagtgtgcccgggactgggatatcaccagagagcagcaagacaacttcgctattgaaagctatcagaagtcccaaaagagccagaaggagggcaagttcgataacgagatcgtcccagttacgattaagggctttagggggaagccggacacgcaagtgactaaggatgaggaacctgcacgccttcatgtcgagaagttgaggtctgcccgcactgtgttccagaaggaaaacggcaccgtcacagccgctaacgcctctccgatcaatgacggggcggcagccgtcattctcgtttcagagaaggtcctgaaggaaaagaatctcaagcccctggccatcattaagggttggggagaggctgcacaccagccagctgatttcacctgggctccttcgcttgcggttcccaaggcattgaagcatgccggtatcgaggacattaactcagtcgattacttcgagttcaacgaggccttctccgtggtcggcctcgtgaacaccaagatccttaagttggacccgtcaaaagtgaatgtctatggtggagctgtggcactcggacatcctctgggttgctcgggagcacgcgttgtggtcacactcctgtccatcctgcagcaagagggcgggaagattggcgttgcggctatttgtaacggtggggggggggcgtcctccatcgtgattgaaaagatttgaggtacctctagaaagctt

SEQ ID NO: 119 - DNA, 1247 bp, Artificial sequence
  synthetic sequence
ctggatccgagctcatggctcccgtcgccgccgctgaaatcaagccgagagatgtgtgtattgttggtgtggcacgcactcctatgggtgggttcctgggtctcctgtccacgctgcctgcgactaagctcggcagcatcgcaattgaggcagctctgaagagggcatcggtggacccatccctcgttcaggaagtgttctttggtaacgtcttgtccgcaaatctcggacaggctcctgcaagacaagcagcactgggtgcaggaatccccaacagcgtggtctgcaccacagtcaataaggtttgtgcgtcaggcatgaaggcaaccatgctggccgctcagtcgatccaacttgggattaacgatgttgtggtcgccggcgggatggagtctatgtcaaatgctccaaagtacctcgcagaagcccggaagggtagcagattgggacacgactctctcgtggatggcatgctgaaggacgggctttgggatgtttataacgacgtgggcatggggtcttgcgccgagatttgcgctgacaatcactcaattacgcgggaagaccaggataagttcgccatccattcgtttgagagaggtattgcggcacaagaatccggagctttcgcgtgggagatcgtgccagtcgaagtttctggtggacggggcaagccgctgactattgtggacaaggatgagggtctcggaaagttcgatcctgtcaagctgaggaagctccgcccctcctttaaggaaaacggcgggaccgtgacagcgggcaatgcatccagcatcagcgacggagcagctgcactcattctggtttctggcgagaccgcgcttaagttggggctccaggtcatcgcaaagattaggggatacgcagacgcagcacaagctccagagttgttcacgactgcaccagccctcgctatcccgaagacaattgcgaacgcaggcctggatgcctcccaggtggactactatgagatcaacgaagcctttgctgttgtggcgttggcaaatcaaaagctcttgggccttaacccagagaaagtgaatgtccacggtggagccgtctcattgggacatccactcggatgctcgggggctaggattctggtcacactcctgggtgttcttcgcaagaagaacgctaagtatggagtgggaggagtctgtaatggtggaggaggagcaagcgctctcgtcgttgagcttttgtgaggtacctctagaaagctt

SEQ ID NO: 120 - DNA, 1209 bp, Artificial sequence
  synthetic sequence
ggatccgagctcatgaagaactgtgttattgtgtcagcggttaggactgccattgggtctttcaacgggtcactcgccagcacctctgccatcgacttgggcgcgacagtcatcaaggccgctattgagagggcaaagatcgactctcagcacgtggatgaagtcattatgggtaacgttcttcaggcggggttgggtcaaaatcctgcacgccaggccctcctgaagtccggtctcgcagagaccgtttgcggattcacagttaacaaggtctgtggatctggccttaagtcagtggccttggcagcacaggctatccaagcaggacaggcacaaagcattgtcgccggcgggatggagaatatgtctctcgctccctaccttttggatgctaaggcaaggagcggctaccgcctgggggacggtcaggtctatgatgttatcctcagggacggactgatgtgcgcaacccacggataccatatgggcatcacagcggagaacgtcgcaaaggaatatggcattacgcgggagatgcaagatgaacttgctttgcattcacagagaaaggcagctgcagcaatcgagtcgggagcctttactgctgaaattgttccagtgaacgtggtcacgcggaagaagactttcgtgttttcgcaggacgagttcccaaaggccaattccacggcagaagcccttggcgccttgagaccggcttttgataaggcggggaccgttacagcggggaacgcatccggtatcaatgacggagccgctgcgcttgtgattatggaggaaagcgcagcattggctgcaggactcaccccactggcgcggatcaagtcctatgcaagcggtggagtgccaccagcactcatgggaatgggacctgtccccgcaacacagaaggccctccaactggctggccttcaattggcggacatcgatctgattgaggccaacgaggccttcgcagcccagtttctcgctgtcggcaagaatctggggttcgattctgagaaggtcaacgttaatggcggggctatcgcgctgggacacccaattggagcatcaggcgcccgcatcctcgtcaccctcctgcatgccatgcaagctcgcgacaagacgctcggtctggccactctctgtattggtggaggccagggaatcgctatggtcatcgagaggctgaattaaggtaccaagctt

SEQ ID NO: 121 - DNA, 1425 bp, Artificial sequence
  synthetic sequence
ggatccgagctcatggcaaagaatgttggtatcctggctatggacatctatttcccgcccacctacgttcagcaagaagcactggaggcacacgacggcgcttccaagggcaagtacacaatcggccttgggcaggactgcatggcgttctgtacggaggtcgaagatgttatttctatgtcactcaccgcagtgacatcgctcctggagaagtacaacatcgaccctaatcagattggtcggctggaggttggatctgaaacagtgatcgataagtcgaagtccattaagacgttccttatgcaaatcttcgagaagtttggtaacacagacattgaaggagtggatagcgctaatgcatgctacggagggacggcagctttgttcaactgtgtgaattgggtcgagagcaactcttgggacggccgctacgggctggtggtctgcactgatagcgcagtctatgcagaaggacctgctagaccaaccggtggagcagcagccatcgcgatgctgattggcccagaggctccgatcgcgttcgaatccaagtttagggggtctcacatgtcacatgcatacgacttctataagccaaacctggcctcggagtacccggttgtggacggcaagctctcccagacctgttatctcatggcactggatagctgctacaagcacttttgtgccaagtatgagaagctcgaagggaagcagttctcaatctcggacgccgagtacttcgtgtttcattctccatataacaagctggtccaaaagtcatttgctcggcttgtcttcaacgattttgttagaaatgcgtccagcattgacgatgctgcgaaggagaagctcgcccctttctcgaccttgtccggcgacgagtcttaccagaatagggatctggaaaaggtctcacagcaagttgctaagcccttgtatgacgcgaaggttcagcctaccacactcatccccaagcaagtgggtaacatgtacactgcttccctctatgcagccttcgcgagccttttgcacaataagcataccgagctggccggcaagcgcgtgatcctgttcagctacggttctggacttacggctactatgttttcccttagattgcacgagggccagcatccattctccttgagcaacattgcaactgttatgaatgtggccgggaagctcaagaccaggcacgagttcccaccggaaaagtttgcagtcatcatgaagctgatggagcatcgctacggtgccaaggactttgttacatcaaaggattgctcgattttggcgccgggaacgtactatctcactgaggtcgacaccatgtacaggcgcttctatgcacaaaaggccgtgggcgatacggtcgaaaacggcctcctggctaatgggcactgaggtacctctagaaagctt

SEQ ID NO: 122 - DNA, 1500 bp, Artificial sequence
  synthetic sequence
ggatccgagctcatgaagctgtccacgaagctgtgctggtgcggtatcaagggtagactgcgcccccaaaagcaacaacaactccataacacgaatctccaaatgacggagctgaagaagcagaagacggccgaacaaaagactcggcctcagaacgtgggcatcaagggcatccaaatctacatccccactcagtgcgtgaatcaatcggagcttgaaaagttcgacggtgtctcccagggaaagtataccatcggcctcgggcagacaaacatgtcttttgtcaatgaccgggaggatatctactccatgagcctcacggttctgtccaagctcatcaagtcatacaacatcgacactaataagatcggtagattggaagtgggaaccgaaacactcatcgataagtctaagtcagtcaagagcgttttgatgcagctcttcggcgagaacacggacgtcgaagggattgatactctcaacgcgtgctacggcgggacaaatgcattgtttaactctctcaattggatcgagtcaaatgcgtgggacggtcgggatgcaattgtggtctgtggagacattgctatctacgataagggagcagctagacctaccggtggagcaggtacagtggcaatgtggatcggaccagacgccccgattgtcttcgattccgttagggccagctacatggagcacgcttacgacttctataagccagattttaccagcgaatacccgtatgtcgacggccatttctctctgacatgctatgtgaaggcccttgatcaggtctacaagtcgtattccaagaaggctatctcgaagggactggtttccgaccctgcagggagcgatgctctgaacgtgcttaagtacttcgactataatgtgtttcacgtccccacgtgtaagctcgttactaagtcctacggccggctcctgtataacgacttcagagccaatcctcaattgtttcccgaggtcgatgccgaactggctaccagggactacgatgagtcactgaccgacaagaacatcgaaaagacattcgttaatgtggcgaagccatttcataaggagcgcgttgcacagagcctcattgtgccgacgaacactggcaatatgtacacagccagcgtgtatgcggcattcgcttctcttttgaactacgtcggctcagacgatttgcaaggcaagcgcgttgggctctttagctacggttctggactggccgcttcactttattcgtgtaagatcgttggcgacgtgcagcacatcattaaggagttggatatcacgaacaagctcgcgaagaggattaccgagacaccaaaggactacgaagcggcaatcgagctgcgcgaaaacgcacaccttaagaagaatttcaagccgcaagggtcgatcgagcatctgcagtccggtgtgtactatcttaccaacattgacgataagttcaggcgctcctacgatgtcaagaagtaaggtaccaagctt

SEQ ID NO: 123 - DNA, 1851 bp, Artificial sequence
  synthetic sequence
ggatccgagctcatggatgttaggagaagaccaaccagcggcaagacgattcattccgttaagcccaagtcagtggaggacgagtcggcacagaagccctccgacgccttgccactcccgctgtaccttatcaacgctctctgcttcacagtgttcttttacgtggtctattttctcctgtcgcggtggagagaaaagattcgcacgtccactccccttcacgttgtggctttgagcgagatcgccgctattgtcgcgttcgttgcatcttttatctatcttttggggttctttggtatcgatttcgtccagtcattgattctccggccaccgacggacatgtgggccgttgacgatgacgaggaagagacagaagagggcattgtgctccgggaggatacgagaaagctgccgtgcgggcaagcccttgactgttcattgtcggcgcctcccctctctagggcagtcgtttccagccccaaggccatggacccaatcgtcctgcctagccccaagccaaaggttttcgacgaaattccgtttcctaccacaacgactatccccattctcggcgatgaggacgaagagatcattaagtcggtggtcgcgggcactatcccatcctacagcctcgaatccaagctgggggattgcaagagagcagcagcaatcaggagagaggcactccagaggattaccggaaagtctctgtcaggcctgccccttgaagggttcgactacgagagcatcctgggccagtgctgtgagatgccagtggggtatgtccaaatcccggtgggaattgccggccctctcctgcttgatggcaaggaatatagcgtgccaatggccaccacagagggttgcctggtcgcttctaccaaccgcggctgtaaggccatccatctttccggaggagctacgagcgtcttgctcagggatggcatgactagggccccagttgtgcggttcgggaccgcaaagagagctgcacagttgaagctctacctggaagaccctgccaactttgagaccctctcgacatccttcaataagtcttcaaggtttggtcgccttcaatccatcaagtgcgcaattgccggaaagaatctctatatgcgcttctgctgttctacaggggacgccatgggtatgaacatggtgtcaaagggcgttcagaacgtgctcaatttcctgcaaaatgattttccggatatggacgtgatcgggctgtctggtaacttctgctcagacaagaagcctgcagccgtcaattggattgaaggaaggggcaagagcgtcgtttgtgaggcgatcattaagggcgacgtggtcaagaaggtgctcaagactaacgtggaagcacttgtcgagttgaacatgctcaagaatctgaccggttcagctatggcgggagcactgggtggattcaacgcccacgcttcgaatatcgtcaccgccatctacattgctacaggccaggacccagcgcaaaacgtcgaatcgtccaattgcatcacaatgatggaggcagttaatgatggtcaggacctccatgtttcggtgacgatgccatccattgaggtcggcacggttggcgggggtactcagcttgcgagccaatctgcatgtttgaacctgcttggagtgaagggagcatccaaggagaccccaggtgcaaatagcagagtccttgcctctatcgttgctggatcagtgttggctgcggagctttcattgatgtcggccattgcagccggccagctggttaactcccacatgaagtacaacagggctaataaggaggctgcggtcagcaagcctagctcttgaggtacctctagaaagctt

SEQ ID NO: 124 - DNA, 1605 bp, Artificial sequence
  synthetic sequence
ggatccgagctcatggctgccgatcaactggtgaagaccgaggttactaagaagtcgtttactgcccctgtccaaaaggcgtccactcccgtgctgaccaacaagaccgttatctcgggttccaaggtgaagtccctctccagcgcccagtcttcatcgtccggaccatcctcctcctccgaggaagacgattcgcgggacatcgagtccctggataagaagattagacctctcgaggaactggaagccctcctgtccagcggcaacacaaagcaactcaagaataaggaggttgccgctctcgtgatccacggcaagctccccttgtacgctcttgaaaagaagttgggagacaccacaagggcggttgcagtgaggcgcaaggcgctttcgattttggccgaggctccggtgctcgcatcagataggctgccttataagaactacgactatgatcgcgtgttcggcgcctgctgtgagaatgtcatcgggtacatgccacttccggtcggtgttatcggacccctcgtgatcgacggcacatcttatcatatcccaatggcgacgactgagggttgcctcgtcgcaagcgcaatgagaggctgtaaggccattaacgctggcgggggtgcaaccacagtgctgactaaggacggtatgaccaggggaccagtggtccgcttccctacgcttaagcgctctggcgcctgcaagatttggctcgattcagaggaagggcagaacgcgattaagaaggcattcaatagcacatctaggtttgcgcgcctccagcacatccaaacgtgtctggcaggtgaccttttgttcatgcggtttagaacaactaccggcgatgctatggggatgaatatgatttcaaagggcgttgagtactcgctcaagcaaatggtggaggaatatggttgggaggacatggaagttgtgtcagtgtcgggaaactactgcactgataagcccgcggcaatcaattggattgagggaagggggaagtccgtcgttgcagaagctaccatcccaggcgacgtggtcagaaaggtcctgaagtctgatgtctcagccctcgttgagctgaacattgctaagaatcttgtcggtagcgcgatggcaggatctgttggaggcttcaacgcccatgccgctaatctggtgacagccgtctttctcgctctgggccaggaccctgctcaaaacgtggagtcttcaaattgcatcacgctcatgaaggaagtcgacggggatctgcggatttccgtcagcatgccgagcatcgaggttggcacaattgggggtggaacggttcttgaacctcagggggcgatgttggatctcctgggcgtcagaggaccacacgcaacagctccaggcacgaacgcgcggcaactcgcaagaatcgtggcatgcgcagtcctggcaggagagctttccttgtgtgcggcacttgccgctgggcatttggtgcagagccacatgactcataacaggaagcctgccgagcccactaagccaaacaatcttgacgctaccgatatcaatcgcttgaaggacggctccgtcacctgcattaagagctaaggtaccaagctt

SEQ ID NO: 125 - DNA, 1191 bp, Artificial sequence
  synthetic sequence
ggatccgagctcatggaagtcaaggcaagggctccgggcaagattattctcagcggggaacacgcagtcgttcacgggtctacagcggtggcggcatcgatcaacctgtacacgtatgtcactctttcgttcgccaccgctgagaatgacgattctcttaagttgcagctcaaggacctggcgcttgaattttcatggccaatcggaaggattcgcgaggccttgtccaacctcggcgctccgtccagctctacgaggacttcttgctccatggagtctatcaagacaatttcagccctggtggaggaagagaatatcccggaggccaagattgctctcacctcaggggtctcggcgttcttgtggctctacacaagcatccaaggttttaagcctgcaaccgtggtcgttacaagcgatctgccccttggctctgggctgggttcatcggccgctttctgtgtcgccctttccgcggcactcctggctttttcggactccgttaacgtggataccaagcacctggggtggtcgatcttcggtgaatccgacttggagcttttgaataagtgggccctcgaaggcgagaagatcattcatggaaagccttcaggcattgataacacggtgtcggcttatggaaatatgatcaagttcaagtctggcaacctcactcggattaagtcaaatatgcccctgaagatgcttgttaccaacacacgggtggggagaaatacgaaggcgttggtcgcaggtgttagcgagaggactctccgccacccaaacgcgatgtctttcgtgtttaatgcagtcgacagcatctctaacgagctggccaatatcattcagtccccagctccggacgatgtgagcattacggaaaaggaagagaagttggaagagctgatggagatgaaccaggggctcctgcaatgcatgggtgtctcccatgctagcatcgagaccgttctgcgcaccacacttaagtacaagttggcatccaagctcacaggagcaggaggaggtggatgtgttctcacgcttttgccaactctcctgtccggcaccgtggtcgataaggcgattgcagaactggagtcctgcggcttccaatgtcttatcgccggaattggcgggaacggcgtggagttctgctttggtggctcctcctgaggtacctctagaaagctt

SEQ ID NO: 126 - DNA, 1356 bp, Artificial sequence
  synthetic sequence
ggatccgagctcatgtctctcccatttcttacttccgccccaggcaaggtcattatttttggtgaacactcagcagtctacaacaagccagcagtcgcagcttcggtctccgcgctgaggacttacctcctgatctcggagtccagcgcccctgacaccatcgaactcgacttccccgatatttcttttaaccacaagtggtcaatcaacgacttcaatgcaattactgaggatcaggtcaattctcaaaagctggcgaaggcacagcaagccaccgacggcctgtcccaggagcttgttagccttctcgacccactcctggctcaactcagcgaatctttccactaccatgccgctttctgctttttgtatatgtttgtttgcctctgtccacatgctaagaacatcaagttcagcttgaagtctaccctcccgattggcgctgggctgggttcttcagcgtcaatctcggtgtccttggccctcgctatggcgtatttgggcgggctcattgggtcgaacgacctggagaagctctccgaaaacgataagcacatcgtgaatcagtgggccttcatcggcgagaagtgtattcatggaacaccttctggcattgacaacgcagtcgccacgtacggaaatgctcttttgtttgagaaggattcacacaacggcacaatcaatacgaacaatttcaagtttctcgacgatttcccagcgatcccgatgattctgacttatacccgcatcccacgcagcacaaaggacctggttgcacgggtgagagtccttgttacggagaagttccctgaagtgatgaagcccattctggatgcaatgggagagtgcgccttgcagggcctcgaaatcatgacaaagctctccaagtgtaagggtacagacgatgaggccgtcgaaacgaacaatgagttgtacgaacaactcctggagcttatccggattaaccacggccttttggtgtcaatcggggtctcgcatccgggtctggaacttatcaagaatctgagcgacgatcttcgcattgggtctactaagctcaccggtgcaggtggaggaggatgctccctcactctcctgaggagagacatcacccaggagcaaattgattccttcaagaagaagctccaggacgatttctcgtatgagacatttgaaacggacctcggtggaacgggctgctgtcttttgtccgcaaagaacttgaataaggatctcaagattaagagcctggttttccagctttttgagaacaagaccacaacgaagcagcaaatcgacgatctcctgcttccaggcaacactaatctcccgtggaccagctaaggtaccaagctt

SEQ ID NO: 127 - DNA, 1542 bp, Artificial Sequence
  synthetic sequence
ggatccgagctcatggcagtcgttgcgtccgctccagggaagggtgttatgacagggggctatcttattcttgagagaccaaatgcaggtatcgtgctttccacgaacgctaggttctacgcgatcgttaagcctatgtatgacgaaattaagcccgattcttgggcatgggcctggaccgacgtgaagctcacatcaccacagctggccagggagtcgctttacaagctctccctcaagaacctcgcactgcaatgcgtctccagctctgcctcccgcaatccgttcgttgagcaggcagtgcaatttgcagtcgcagctgcacacgcaaccctggacaaggataagaacaatgtgcttaacaagctcctgcttcagggcttggacatcacgattctggggacttccgattgctatagctgtcgcaatgagatcgaagcgtgcggccttcctttgacgcccgaatcactcgcagccctgccttcgttctcatcgattacttttaacgtcgaggaagctaacgggcagaattgtaagccagaggttgcaaagaccggactggggtccagcgctgcaatgaccacagctgtggtcgcagccttgctccaccatctcggcctggtggacctctcttcatcgtgcaaggagaagaagttcagcgaccttgatttggtgcacatcattgcacagacagcccattgtatcgcacaaggcaaggtcggttctggattcgatgtttccagcgccgtgtacggatctcacaggtatgttcgcttttcaccagaggtgctgtcttcagctcaggacgcgggcaaggggattccgctgcaagaagtcatcagcaacattctcaagggcaagtgggatcatgagcggacgatgttctcccttccaccgttgatgagcctgcttttgggcgagccaggaacgggagggtcgtccactccatccatggtgggcgccctcaagaagtggcagaagagcgacacccagaagtctcaagagacatggaggaagctctctgaggcaaactcagccctcgaaactcagttcaacatcctcagcaagctggctgaggaacactgggacgcgtacaagtgcgtcatcgattcatgttcgaccaagaactccgagaagtggattgaacaggctacagagccttccagggaagctgttgtgaaggcgctcctgggcagccgcaacgcaatgctgcagatccggaattatatgagacaaatgggagaggctgcaggggtgccaattgagccggaatcccagacccggcttttggacacgactatgaacatggatggagtcctcctggcaggcgttccgggagcaggtggattcgacgctgtctttgcggttacgctcggcgacagcggaactaacgtcgctaaggcctggtcctccctcaacgtgttggcccttttggtccgggaggaccctaatggtgttctcctggaatcgggagatcccagaacaaaggagatcaccacagcagtgtccgccgtccatatttgaggtacctctagaaagctt

SEQ ID NO: 128 - DNA, 1380 bp, Artificial sequence
  synthetic sequence
ggatccgagctcatgtcggaactcagagcattttcggcaccggggaaggcactgttggcaggtggttatcttgttttggaccctaagtatgaagcatttgtggtcggacttagcgcaagaatgcacgcagtcgctcatccttacgggtcgttgcaggagtccgacaagttcgaagttagagtgaagagcaagcagttcaaggatggcgagtggctgtatcacatctctccaaagacaggattcatcccggtgagcattggcgggtctaagaacccttttatcgagaaggtcatcgccaacgtcttctcatactttaagcccaatatggacgattattgcaacaggaatctcttcgttatcgacatcttctccgacgatgcttaccactcacaggaggattcggtgaccgaacatcggggcaataggcgcctttctttccactcacatagaatcgaggaagtcccaaagactggcttggggtccagcgctgggttggtcaccgttctcaccacagcgctggcatccttctttgtgagcgacctcgagaacaatgtggataagtacagggaggtcatccacaacctgtctcaggtggcgcattgtcaggcacaaggcaagatcggttcgggattcgacgtcgcagctgcagcatacggctccattcgctatcggagatttccaccggcccttatcagcaacttgccagacattggctctgccacatacgggtcaaagctcgctcacctggtcaacgaggaagattggaatatcacaattaagtcgaatcatcttccgtccggccttacgttgtggatgggtgacatcaagaacggctccgagacggtgaagctcgtccagaaggttaagaattggtacgacagccacatgccagagtctctcaagatatacactgaactggatcatgcgaactccaggttcatggacggtcttagcaagttggatcgcctccacgagacccatgacgattactcagaccagattttcgagtcgctcgaacggaatgattgcacctgtcaaaagtatccggagattacagaagttagggacgccgtggctacgatcaggcgctctttccgcaagattactaaggagtcaggcgcagatatcgaacctcccgtccagacctccctcctggacgattgccaaacgctgaagggcgttctgacttgtcttattcctggggcgggtggatacgacgcgatcgcagttattgcaaagcaggacgtggatctccgggcccaaaccgctgacgataagagattctccaaggtccagtggctggacgttacacaagccgattggggcgtgcgcaaggagaaggaccccgaaacgtatctcgataagtaaggtaccaagctt

SEQ ID NO: 129 - DNA, 1278 bp, Artificial sequence
  synthetic sequence
ggatccgagctcatggcagaatcatgggtcattatggtcaccgcacaaactcctacaaacattgctgtcatcaagtattggggaaagagggacgagaagttgattctccctgtgaacgacagcatctctgtgaccctcgacccagtccacctctgcaccacaacgactgtcgcggtttcaccatcgttcgcacaggatcggatgtggctgaacggcaaggagatttcccttagcggcgggcgctaccagaattgccttcgcgaaatcagggcacgcgcctgtgacgttgaggataaggaaagagggattaagatcagcaagaaggactgggagaagctccacgtgcatattgcttcttataacaatttcccaacagcagctggtttggcctccagcgcagcaggattcgcttgcctcgtgtttgctctggcgaagctcatgaacgctaaggaggatcatagcgaattgtctgcaatcgcaagacagggctctgggtcagcatgtagatccctgttcggtggatttgtgaagtggaagatgggcaaggtcgaggacgggtcggattccctggcagttcaggtggtcgacgaaaagcactgggacgatcttgtgatcattatcgccgttgtgtcttcaaggcaaaaggagacgtcgtccaccaccggtatgcgcgagacggtcgaaacttccctcctgcttcagcatagggcaaaggagattgttcctaagcgcatcgtgcagatggaggaatcgattaagaacaggaatttcgcttcctttgcgcacctgacttgcgcggactctaaccagttccatgcagtctgcatggatacgtgtccaccgatcttttacatgaacgacacttcccaccggattatcagctgtgttgagaagtggaatagaagcgtcggcaccccacaagttgcgtatacattcgatgcaggaccgaacgccgtcctgatcgctcataatcgcaaggccgctgcgcagttgctccaaaagctgcttttctactttcctcccaactctgacaccgagctgaactcctacgtgcttggcgacaagagcattctcaaggatgccgggatcgaggacttgaaggatgtcgaagctctcccaccacctccagagattaaggacgcaccaagatacaagggcgatgtctcatatttcatctgcacccggccaggtagaggaccggttttgctctcagacgagtcgcaggccctgctttcgcctgaaacaggcctccccaagtgaggtacctctagaaagctt

SEQ ID NO: 130 - DNA, 1215 bp, Artificial sequence
  synthetic sequence
ggatccgagctcatgactgtctacaccgccagcgttaccgcacctgtgaacattgccacgttgaagtattgggggaagagagatacgaagttgaacctgccaacgaactccagcatcagcgtcactctctctcaggacgatctgcgcacgcttacttccgcagctaccgcacctgagttcgaaagagatacactctggctgaatggtgaaccccactccattgacaacgaacgcacccagaattgcttgagggatctccgccaactgcggaaggagatggaatcaaaggacgcttcgcttcctactttgtctcagtggaagctgcatatcgtgtcagagaacaatttccccaccgcggcaggtcttgcgtcttcagccgctggatttgcggcattggtcagcgccattgctaagctctaccagctgccgcaatccaccagcgagatcagcagaattgcgaggaagggttctggatcagcatgccggtcgcttttcggcgggtatgtcgcctgggagatgggcaaggctgaagacgggcacgattccatggccgttcagatcgctgactcgtccgattggcctcagatgaaggcctgcgttctggtggtctctgacattaagaaggatgtgtcctccacacagggcatgcaactcaccgtcgccacaagcgagctgttcaaggagagaatcgaacatgttgtgcccaagcgctttgaggtcatgcggaaggctattgtcgaaaaggatttcgcgacgtttgcaaaggagactatgatggactcgaactccttccacgcgacgtgcctcgattccttcccaccgatcttttacatgaacgacacatccaagaggatcattagctggtgtcatacgatcaatcagttctacggcgagaccattgttgcttatacatttgatgcggggccaaacgcagtgctttactatttggccgagaacgagtccaagctcttcgcttttatctataagttgttcggttctgttccgggatgggacaagaagtttaccacagagcagctcgaagcgttcaaccaccaatttgagtcatcgaatttcacagcaagagagcttgacttggaactccagaaggatgtcgccagggttatcctgacgcaagtgggctcggggccacaagagactaacgagtccctcattgacgccaagaccggcctgccgaaggagtaaggtaccaagctt

SEQ ID NO: 131 - DNA, 2193 bp, Artificial sequence
  synthetic sequence
ggatccgagctcatggcgttgactacattttcgatttcacgggggggtttcgttggagccctgccgcaagaaggacactttgcacctgccgctgctgagctttcgttgcacaagctgcagtcccggcctcataaggcaaggagacggtccagctcttcaatcagcgcatctctctcaacggagcgggaagccgctgagtaccactctcaaagaccaccgacgcctctcctggacactgtgaactatcccatccatatgaagaatctcagcctgaaggagcttcagcaattggcggacgaactgcgctccgatgtcattttccacgttagcaagacgggcgggcatcttggatcgtccttgggagtggtcgagctgacggtggcactgcactacgtctttaacactccgcaggacaagatcctctgggatgtcggacaccaatcctatcctcataagattctgactggcagaagggacaagatgcccacgatgaggcagactaatggtctctccggattcaccaagcgctcggagtccgaatacgattcgtttggaacaggccatagctctaccacaatctccgcagcattgggaatggcagtgggtagggacctcaagggtggaaagaacaatgttgtggcagtcattggggatggtgcgatgaccgcaggacaggcctacgaggctatgaacaatgccggctatctggacagcgatatgatcgttattcttaacgacaataagcaagtgtctctgcctaccgcaacacttgatggaccagcacctccagtgggtgcgctgtcatcggcactcagcaagctgcagtccagccgccctcttcgggagttgagagaagtggccaagggcgtcaccaagcaaatcggcgggtccgttcacgagctggccgctaaggtggacgaatacgctcgggggatgattagcggatctggctcaacactcttcgaggaacttggcttgtactatatcggacccgtggatggccataacattgacgatcttatcacgattttgagagaggtgaagtccactaagacgactggcccagtcctcatccacgtcgttacggagaaggggaggggttacccgtatgcggaacgcgcggcagacaagtaccatggggtcgcgaagttcgatccagcaactggcaagcagtttaagagcccggcaaagaccttgtcttacacaaactatttcgccgaggctcttatcgcggaggcagaacaagacaatagggtggtcgctattcacgcagctatgggtggaggcaccggcctcaactatttcctgcgccggtttccaaatcgctgcttcgatgtcggcatcgccgagcagcatgctgttacatttgcggcaggattggcctgcgaaggcctcaagccgttctgtgctatctactcttcatttctgcagaggggctatgaccaagttgtgcacgacgtcgatctccagaagctgcctgttcggttcgcgatggacagagcaggactcgtcggagctgatggtccaacccattgcggagcctttgacgttacatacatggcttgtcttccaaacatggtcgttatggccccgtccgatgaggctgaactctgccacatggtggcaaccgcagctgcaatcgacgatagaccaagctgtttccgctacccacgcggaaacggcattggggtccctctgccaccgaattataagggcgttccccttgaggtcggcaagggacgggtgcttttggagggtgaaagagtcgcgctcctgggctacgggtctgcagttcagtattgcctggcagccgcttcacttgtggagagacacggactgaaggtgacggtcgccgacgctagattctgtaagccacttgatcaaactttgatcagaaggctcgcctcgtcccacgaggtccttttgaccgttgaggaaggatcaattgggggtttcggctcgcatgtggcccagtttatggctttggacgggctcctggatggcaagctcaagtggaggcctctcgtcctgcccgaccgctacatcgatcacgggtcaccagcagaccagttggcagaggcaggtctcaccccgtcgcatatcgcggcaacagttttcaacgtgctgggacaagcaagagaagcccttgctattatgacagtgccgaatgcttgaggtacctctagaaagctt

SEQ ID NO: 132 - DNA, 2193 bp, Artificial sequence
  synthetic sequence
ggatccgagctcatggccctctctgcgtgttcgttccctgctcatgttgacaaggcgactatcagcgacctccaaaagtatggttatgtgcccagccgcagcctctggagaacggacctcctggcccagagcttgggaaggctcaaccaggctaagtctaagaagggacctggaggaatctgcgcttccctgagcgagagaggcgaataccactcacagaggccaccgactcctcttttggacaccacaaactatcccatccatatgaagaatcttagcattaaggagctgaagcaacttgccgacgaattgcgctcggatgtgatcttcaacgtctcccggacgggtggacacttgggctcctccctcggagtggtcgagctgactgttgcgcttcattacgtgttctcagcacctcgggacaagatcctttgggatgtggggcaccagtcctacccccataagatcctcaccggtaggcgcgagaagatgtatacgattcgccaaactaatggcctctctgggttcaccaagcggtctgagtcagaatacgactgctttggaacaggccactcttcaacgactatctccgcaggactcggtatggcagtgggaagggacctgaagggcaagaagaacaacgttgtggcagtcattggagatggcgcgatgacagcagggcaggcctacgaggctatgaacaatgccggttatcttgactcagatatgatcgttatcttgaacgacaataagcaagtgtcgctccctaccgccacactggatggaccaatccctccagtgggcgcgctgtcgtccgcattgtcgagactccagtccaacaggcctctgcgcgagcttcgggaagttgcaaagggcgtgaccaagcaaatcggaggaccaatgcacgagtgggcagctaaggtggacgaatacgcccgcggcatgatttcggggtccggtagcacactcttcgaggaacttggcttgtactatatcgggcctgtcgatggtcataatattgacgatttgatcgctattctcaaggaggtgaagtccacgaagaccacaggcccagtcctgatccacgtcgttactgagaagggacgcggctacccgtatgcggaaaaggcggcagacaagtaccatggcgtcaccaagttcgatcccgcgacaggaaagcagtttaagggctcagcaatcacgcaatcgtacacgacttatttcgccgaggctctcattgcggaggcagaagtcgacaaggatatcgttgccattcacgcagctatgggtggaggcacggggctcaacctgttccttcggagatttccaactcgctgcttcgacgtcggcatcgccgagcagcatgctgttacctttgcggcagggcttgcctgcgaaggtttgaagccgttctgtgctatctacagctcttttatgcagcgggcgtatgatcaagtggtccacgacgtggatttgcagaagctcccagtccgcttcgcgatggacagagcaggtctcgtgggagcagatggaccaacccattgcggagcattcgacgtcaccttcatggcttgtctgccaaatatggttgtgatggccccgagcgatgaggctgaacttttccacatggtggcaaccgcagctgcaatcgacgatagaccatcttgttttagatacccgagggggaacggtgtcggagttcagctgccaccggggaataagggtattccgctcgaggtcggcaagggacgcatcctgattgagggcgaacgggttgcgctcctgggttatggaaccgcagtgcagtcctgcctcgcagcagctagcctggtcgagcctcacggccttttgatcaccgttgccgacgctagattctgtaagcccctggatcacacacttattaggagcttggccaagtctcatgaggtcctcatcacagttgaggaagggtctattgggggtttcggttcacacgtggcccacttcctcgctctcgacggactcctggatggcaagctgaagtggagacctctggttcttcccgacaggtacatcgatcacggatctccatcagtccagcttattgaggctggattgacgccaagccatgtggcagcaactgtcctgaacatccttggcaataagagggaagcgctgcaaattatgtcatcgtgaggtacctctagaaagctt

SEQ ID NO: 133 - DNA, 2175 bp, Artificial sequence
  synthetic sequence
ggatccgagctcatggcgttgactacattttcgatttcacgggggggtttcgttggagccctgccgcaagaaggacactttgcacctgccgctgctgagctttcgttgcacaagctgcagtcccggcctcataaggcaaggagacggtccagctcttcaatcagcgcgtctctgtcagagagaggcgaataccacagccagaggccaccgacacctcttttggacacgactaactatcccatccatatgaagaatctttctattaaggagctgaagcaacttgccgacgaactccgctccgatgtgatcttcaacgtcagccggaccggaggacacttggggtccagcctcggtgtggtcgagctgacagttgcgcttcattacgtgttcagcgcacctcgcgacaagatcctgtgggatgtcggacaccagtcttacccccataagatccttacgggcaggcgcgagaagatgtataccattagacaaacaaatggtctctccggattcacgaagaggtcggagtccgaatacgactgctttgggactggtcactcttcaaccacaatctccgcaggactcggaatggcagtgggaagggacctgaagggcaagaagaacaatgttgtggcagtcattggggatggtgccatgaccgctggacaggcgtacgaggccatgaacaacgccggctatcttgactcggatatgatcgttattttgaacgacaataagcaagtgtccctccctacggctactctggatggaccaatccctccagtgggtgccctgtcgtccgctttgtcccgcctccagagcaaccggccactgagagagcttcgcgaagttgcaaagggcgtgaccaagcaaatcggtggaccgatgcacgagtgggccgctaaggtggacgaatacgcccgggggatgattagcggatctggctcaacactcttcgaggaacttggtttgtactatatcggacctgtcgatggccataatattgacgatttgatcgctattctcaaggaggtgaagtccaccaagacgactggcccagtcctgatccacgtcgttacagagaaggggcgcggttacccgtatgcggaaaaggcggcagacaagtaccatggcgtcacgaagttcgatccggcgactgggaagcagtttaagggttcggcaatcacccaatcctacaccacatatttcgccgaggctctcattgcggaggcagaagtcgacaaggatatcgttgccattcacgcagctatgggaggaggcaccggcctcaacctgttccttcggagatttcctacaagatgcttcgacgtcggcatcgcggagcagcatgcagttacatttgcggcaggacttgcctgcgaaggcttgaagcccttctgtgctatctacagctcttttatgcagagggcgtatgatcaagtggtccacgacgtggatttgcagaagctcccagtccgcttcgccatggacagagctggactcgtgggagcagatggtccaacgcattgcggagccttcgacgtcacttttatggcttgtctcccaaacatggttgtgatggccccgtcagatgaggctgaactgttccacatggtggctaccgcagctgcaatcgacgatagaccatcctgttttcgctacccgagaggaaacggcgtcggagttcagctgccaccgggaaataagggcattccgctcgaggtcggcaagggacgcatcctgattgagggcgaacgggttgcgctcctgggctatgggacggcagtgcagagctgcctcgcagcagcttctctggtcgagcctcatggccttttgatcacggttgccgacgctcgcttctgtaagcccctggatcacactcttattcggtctttggccaagtcacatgaggtcctcatcactgttgaggaaggatcaattggaggcttcggctcgcacgtggcgcacttcctcgcactcgacgggctcctggatggcaagctcaagtggagacctctggttcttcccgacaggtacatcgatcacgggtcgccatccgtgcagcttattgaggctggtttgaccccgagccatgtggcggcaacagtcctgaacatccttggcaataagagggaagcgctgcaaattatgtcatcgtgaggtacctctagaaagctt

SEQ ID NO: 134 - DNA, 735 bp, Artificial Sequence
  synthetic sequence
ggatccgagctcatgggtgacgcccccgatactggcatggacgccgtgcaaaggagactgatgtttgaagacgagtgtattctggttgacgaaaatgatcgggcggtcggtcacgcatccaagtacagctgccatctgtgggagaatatccttaagggaaactctttgcacagggcgttctcagttttcctctttaattcgaagtatgaactcctgcttcagcaacgctccgcaacgaaagtgacttttcctcttgtctggaccaacacatgctgttcccatcccttgtacagggagagcgaacgcatcgacgaggatgcccttggcgtgcggaatgccgctcagagaaagttgctcgacgagctggggattcctgccgaagacgttcccgtggatcaattcacgccattgggcaggatgctctacaaggctccgtctgatggcaagtggggggagcacgaactcgactatctgctttttatcgtccgggatgtcaacgttaatccaaacccggacgaggttgctgatattaagtatgtgaacagagacgagctgaaggaattgctcaagaaggccgatgctggcgaggaaggactgaagctctccccttggttccgcctcgtggtcgacaatttcctgtttaagtggtgggagcacgtggaaaaggggacactcaaggaggcggcagatatgaagaccattcataagctgacatgaggtacctctagaaagctt

SEQ ID NO: 135 - DNA, 891 bp, Artificial Sequence
  synthetic sequence
ggatccgagctcatgactgccgacaacaactctatgcctcacggtgcggtttcgtcctatgccaagctggttcaaaatcaaacgcccgaagacatcctcgaggagttcccagagatcattccgctccagcaaaggcctaatacgcgctccagcgagacttctaacgacgagtcaggcgaaacgtgcttcagcgggcacgatgaggaacagatcaagttgatgaacgagaattgtattgtcctcgactgggacgataatgcgatcggcgcagggactaagaaggtttgccacctgatggagaacatcgaaaagggcctcctgcatcgggccttcagcgtgttcatttttaatgagcagggggaacttttgctccagcaaagagctaccgagaagatcacatttcctgatctgtggaccaacacatgctgttctcaccccctttgtattgacgatgagctgggtcttaagggcaagctcgacgataagatcaagggcgccattaccgccgctgtccggaagctggaccatgagcttggtatcccagaggatgaaacgaagactaggggaaagttccactttctgaatcgcattcattacatggcgccttccaacgagccctggggcgagcacgaaatcgactacatcttgttctataagatcaatgcaaaggagaacctcacagttaacccaaatgtgaacgaagtccgcgatttcaagtgggtgtcgccgaatgacctgaagaccatgtttgctgatccatcctacaagttcacaccgtggttcaagatcatttgcgagaactatcttttcaactggtgggaacagttggacgatctctccgaggttgaaaacgaccggcaaattcatagaatgttgtaaggtaccaagctt

SEQ ID NO: 136 - DNA, 1227 bp, Artificial Sequence
  synthetic sequence
ggatccgagctcatggcaccgacagttatggcatcatccgctacagccgttgctcctttccaggggttgaagtccaccgctactcttcccgttgcgaggaggtccaccacctccttcgcgaaggtgtcaaacggcgggaggatcaggtgcatggcatcggagaaggaaattaggcgcgagcgcttcctgaacgtctttcctaagctggttgaggaacttaatgcctcgctcctggcttacggcatgcccaaggaggcctgtgactggtacgctcactccctcaactataatacgccaggtggaaagttgaacagggggctcagcgtggtcgatacgtacgccatcctgtctaataagactgtcgagcagcttggtcaagaggaatatgaaaaggttgctatcttgggatggtgcattgagcttttgcaggcgtacttcctggtcgcagacgatatgatggacaagtccatcacccggagaggccaaccatgttggtataaggttccggaagtgggggaaatcgcgattaacgacgcattcatgctggaggccgctatctacaagctcctgaagtcacactttcgcaacgagaagtactatatcgacattacggagctgttccatgaagttacgtttcagactgagctgggccaactgatggatcttatcactgcgcccgaagacaaggtggatctgtctaagttctcacttaagaagcactccttcattgtcacctttaagacagcctactatagcttttacctgcctgtggcgcttgcaatgtatgtcgccggcatcacagacgagaaggatcttaagcaggctcgggacgtgttgatcccgctcggcgagtacttccagattcaagacgattatctcgattgctttggaacccctgagcagatcggcaagattgggacagacatccaagataacaagtgttcttgggttattaataaggcccttgagttggcctcagctgaacagagaaagaccctggacgagaactacggcaagaaggatagcgtggcggaagcaaagtgcaagaagattttcaacgacttgaagattgagcagctctaccatgaatatgaggaatctatcgccaaggatctcaaggctaagatttcgcaagtcgacgagtcccggggcttcaaggcggatgttttgacagcatttctcaataaggtgtacaagagatccaagtgaggtacctctagaaagctt

SEQ ID NO: 137 - DNA, 1059 bp, Artificial Sequence
  synthetic sequence
ggatccgagctcatggctgatctgaagtcgacgtttttgaaggtgtattccgttctgaagcaggagttgctggaggaccccgcatttgagtggacccctgactccaggcagtgggtcgagcgcatgctcgattacaacgttcctggcgggaagctcaatcggggcctgtctgtgattgactcatataagctcctgaaggaggggcaagaacttaccgaggaagagattttcctcgcgtccgcattgggttggtgcattgagtggttgcaggcctactttctcgtcctggacgatatcatggactccagccacacaaggcgcggccaaccttgttggttcagggtgcccaaggtcggactgatcgcagctaacgatgggattcttttgcggaatcacatcccccgcatcctcaagaagcattttcgcggcaaggcttactatgttgacctcctggatttgttcaacgaagtggagtttcagaccgcgtctggtcaaatgatcgacctcattaccacactggaaggagagaaggatctctcgaagtacaccctttccttgcaccggagaatcgtccagtacaagacagcatactatagcttctatctgccagttgcctgcgctcttttgattgccggcgagaacctcgacaatcatatcgtggtcaaggatattctggtgcagatgggtatctacttccaggtccaagacgattatctcgactgttttggagatccggagacgatcggcaagatcggaactgacatcgaagatttcaagtgctcctggctcgttgtgaaggcactcgagctgtgtaacgaggagcagaagaaggtgctgtacgaacactatggcaaggccgacccagcaagcgtcgccaaggtcaaggttctttacaacgagcttaagttgcaaggggttttcacggaatacgagaacgagtcatataagaagctggtcactagcatcgaggctcatccatctaagccggttcaggctgtgcttaagtcgtttttggcgaagatatacaagaggcaaaagtgaggtacctctagaaagctt

SEQ ID NO: 138 - DNA, 1197 bp, Artificial Sequence
  synthetic sequence
ggatccgagctcatggcaccaaccgtcatggcatcgtccgcaaccgccgtcgcacctttccagggtctgaagtcaacagcaacactcccagtcgcaagaaggtctaccacatcattcgcaaaggtgtccaacggcgggaggatcaggtgcatggccgaccttaagtccacgttcttgaaggtgtacagcgtcctcaagcaggagctgctcgaggacccagcttttgagtggactcccgattcacggcaatgggtggaaagaatgctggactacaacgtcccaggtggcaagctcaatcgcggtttgtccgtgatcgattcctacaagctcttgaaggagggacaggaacttaccgaggaagagattttcctcgcgtccgcactgggctggtgcattgagtggttgcaggcctactttcttgtcttggacgatatcatggactccagccacacaaggcgcgggcaaccatgttggttccgggttccgaaagtgggtctcatcgccgctaacgatggcatcctcctgaggaatcacatcccgcgcattcttaagaagcattttagaggcaaggcatactatgtcgaccttttggatttgttcaacgaagttgagtttcagacggccagcggccaaatgatcgaccttattacgactttggaaggggagaaggatcttagcaagtacacgctctctctgcaccggagaatcgtgcagtacaagactgcttactattctttctatctgcctgtcgcctgcgctctcctgattgcgggcgagaacctcgacaatcatatcgtggtcaaggatattctggttcagatgggcatctacttccaggtgcaagacgattatctggactgttttggcgacccagagaccatcggcaagattgggacagacatcgaagatttcaagtgctcgtggctcgttgtgaaggctcttgagttgtgtaacgaggagcagaagaaggttctgtacgagcactatggcaaggcggacccagcatccgtcgccaaggtcaaggttctctacaacgagctgaagctgcaaggagtgttcaccgaatacgagaacgagtcttataagaagctggtcacatcaatcgaggcgcatccatcgaagccggtccaggctgttctcaagtcatttctggcgaagatatacaagcggcaaaagtgaggtacctctagaaagctt

SEQ ID NO: 139 - DNA, 1083 bp, Artificial Sequence
  synthetic sequence
ggatccgagctcatggcgtcagagaaggagattagaagggagaggtttttgaatgttttccccaagctggttgaagagttgaatgcgtcactgctggcatacggtatgcctaaggaggcgtgcgactggtacgcacactccctgaactataatacccccggcgggaagttgaaccggggactctcggtggtcgatacctacgccatcctgtccaataagacagttgagcagcttggccaagaggaatatgaaaaggtggctatcttggggtggtgcattgagctgctgcaggcctacttcctcgttgctgacgatatgatggacaagtctatcacaaggcgcggtcaaccatgttggtataaggttccggaagtgggagaaatcgccattaacgacgctttcatgctggaggccgctatctacaagctcttgaagagccactttcgcaacgagaagtactatatcgacattaccgagctgttccatgaagtcacctttcagacagagcttggtcaattgatggatctcatcacagcccctgaagacaaggtcgatctgtccaagttcagccttaagaagcacagcttcattgttacgtttaagactgcgtactattctttctacctgccggtcgcgcttgcaatgtatgttgcgggcatcacggacgagaaggatctgaagcaggcaagggacgtgctgatcccacttggcgagtacttccagattcaagacgattatcttgattgctttgggacgccggagcagatcggcaagatcggaactgacatccaagataacaagtgttcatgggtcatcaacaaggccctcgagctggcatcggctgaacagcgcaagacgctggacgagaactacggcaagaaggattccgtcgcggaagcaaagtgcaagaagattttcaacgacttgaagattgagcagctctaccatgaatatgaggaaagcatcgcgaaggatctcaaggcaaagatttctcaagtcgacgagtcacgggggttcaaggccgatgtgttgactgcttttctcaacaaggtctacaagagatccaagtaaggtaccaagctt

SEQ ID NO: 140 - DNA, 1893 bp, Artificial Sequence
  synthetic sequence
ggatccgagctcatggcccctacggtcatggcgtcctcagcgactgcggttgcaccctttcaaggtctcaagagcacggcgacactccctgtggcacggagatcgaccacatccttcgccaaggtttccaacggcgggagaatcaggtgcatggacacgctgccaatttccagcgtctcattttcttcatcgacttcgcctcttgtggtcgacgataaggtttcgacgaagcccgacgtgatcaggcacactatgaacttcaatgcttcaatttggggcgatcagtttctgacctacgacgagccagaggacctcgtgatgaagaagcaactcgttgaggaactgaaggaggaagtgaagaaggagctgatcacaattaagggtagcaatgagccgatgcagcacgtgaagctcatcgagttgattgacgcggtccaacgcttgggaatcgcataccatttcgaggaagagatcgaagaggcccttcagcacattcatgtcacctacggcgagcagtgggttgataaggaaaacttgcaatcaatttcgctctggttccgcctcctgcggcagcaaggttttaatgtgtccagcggagtcttcaaggactttatggatgagaagggcaagttcaaggaatctctctgcaacgacgcgcagggaatccttgcattgtacgaggccgctttcatgcgggtggaggacgaaaccattcttgataatgcgttggagtttacaaaggtccacttggatatcattgcaaaggacccgtcatgtgattcttcactcagaacccagatccatcaagccctcaagcagccactgaggagaagacttgcaaggatcgaggcactgcactacatgccgatctaccagcaagagacatcccatgacgaagttcttttgaagctcgctaagctggatttctcggtgttgcagtccatgcacaagaaggagctgagccatatctgcaagtggtggaaggacctcgatctgcaaaacaagctgccttacgtgcgcgaccgggttgtggagggctatttctggattctctccatctactatgagccccagcacgcgagaaccaggatgtttctgatgaagacatgcatgtggcttgtcgttttggacgatacgttcgacaattacggtacttatgaagagctggagattttcacccaagcagtggaacgctggtccattagctgtctcgatatgctgcctgagtacatgaagctcatctatcaggagcttgttaacttgcacgtggagatggaggagagcctggagaaggaagggaagacgtaccaaattcattatgtcaaggagatggccaaggaactggtgagaaattaccttgtcgaggctaggtggctgaaggaaggctacatgcccacccttgaagagtatatgtctgtctcaatggttacgggcacttacgggctcatgatcgcgcgctcttatgtgggtcggggagacattgtcaccgaggatacattcaagtgggtctcgtcctacccaccgatcattaaggcgtcctgcgttatcgtgcgcctgatggacgatattgtcagccacaaggaagagcaggagcggggccatgttgcaagctctatcgagtgctacagcaaggaatctggggcctccgaagaggaggcctgcgagtatatctctcgcaaggttgaagacgcctggaaggtcatcaacagagagtcactgaggccaacggctgtgcctttccccctcctgatgccggccatcaacttggctcggatgtgtgaggtcctctacagcgttaatgacggcttcactcacgccgagggggatatgaagagctatatgaagtctttctttgtccatcctatggtggtctgaggtacctctagaaagctt

SEQ ID NO: 141 - DNA, 1749 bp, Artificial Sequence
  synthetic sequence
ggatccgagctcatggataccctgcctatttcgtccgtctcgttctcctcttctacgtcgccactggtcgtcgatgataaggtgtctacaaagcctgatgtgatccgccacacgatgaacttcaatgcctctatctggggcgaccagtttctgacttacgacgagcctgaggacctcgtgatgaagaagcaactcgtcgaggaactgaaggaagaagtcaagaaggagctgatcacgattaagggctcaaacgagcccatgcagcacgtgaagctcatcgagttgattgacgcggtgcaaaggctggggatcgcataccatttcgaggaagagatcgaagaggctcttcagcacattcatgtgacatacggcgagcagtgggtcgataaggaaaacttgcaatcaatttcgctctggttcagactcctgaggcagcaaggctttaatgtctccagcggggttttcaaggactttatggatgagaagggcaagttcaaggaatcgctctgcaacgacgcgcagggcatcctcgcattgtacgaggccgctttcatgcgcgttgaggacgaaaccattcttgataatgcgttggagtttacaaaggtccacttggatatcattgcaaaggacccttcttgtgattcttcactccgcacgcagatccatcaagccctcaagcagcctctgaggagaagacttgcaagaatcgaggcactgcactacatgcccatctaccagcaagagacttcccatgacgaagtccttttgaagctcgctaagctggatttctctgttttgcagtcaatgcacaagaaggagctgagccatatctgcaagtggtggaaggacctcgatctgcaaaacaagttgccatacgtgagagacagggtggtcgaggggtatttctggattctctccatctactatgagccgcagcacgcgcgcacgcggatgtttctgatgaagacttgcatgtggcttgttgtgttggacgataccttcgacaattacggcacatatgaagagctggagattttcacccaagcagtggaaaggtggtccattagctgtctcgatatgctgccagagtacatgaagctcatctatcaggagcttgtgaacttgcacgtcgagatggaggagagcctggagaaggaaggaaagacctaccaaattcattatgtcaaggagatggccaaggaactggtccgcaattaccttgttgaggctcggtggctgaaggaaggctacatgccgacacttgaagagtatatgtctgtttcaatggtgaccggtacatacggactcatgatcgccagatcctatgttggcaggggggacattgtgacggaggatactttcaagtgggtgtcgtcctacccaccgatcattaaggcgagctgcgtgatcgtcagactgatggacgatattgtgtctcacaaggaagagcaggagaggggtcatgtcgcaagctctatcgagtgctactcgaaggaatccggagccagcgaagaggaggcctgcgagtatatctcaagaaaggtcgaagatgcctggaaggttattaatagagagtcgctgagaccaaccgctgtgcctttcccactcctgatgccggccatcaacttggctcggatgtgtgaggttctctacagcgtgaatgacggttttacacacgccgagggagatatgaagtcgtatatgaagtccttctttgtccatccaatggtcgtttaaggtaccaagctt

SEQ ID NO: 142 - DNA, 1767 bp, Artificial Sequence
  synthetic sequence
ggatccgagctcatggacttggcggtggagattgctatggacctggctgttgacgatgttgaacggcgggtgggggactatcactcgaacctgtgggacgacgatttcattcagtcgctctccacgccatatggcgcatccagctacagggagagagcagaaagactggtgggagaggtcaaggaaatgttcaccagcatctctattgaggacggtgaactcacatccgacctcctgcagagactgtggatggttgacaacgtggagcggctcggaatctcgagacacttcgagaacgagatcaaggccgctattgactacgtctattcatactggtcggataagggcattgttcgggggagagactctgctgtgccggatctcaactcaatcgcgctgggcttccggaccctcagactgcatgggtacacagtgtcttcagacgtcttcaaggtttttcaggataggaagggcgagttcgcctgctcagctattccaaccgaaggcgacatcaagggagttctgaatcttttgcgcgcatcctatatcgccttcccgggcgagaaggtcatggagaaggctcaaacctttgcggcaacataccttaaggaggcgttgcagaagattcaagtgtcgtccctcagccgcgagatcgaatatgtccttgagtacggctggttgacaaacttccctaggctggaggcacgcaattatattgacgtcttcggggaggaaatctgcccatactttaagaagccgtgtatcatggttgataagctcctggagctggccaagctggagttcaacctctttcacagcctgcagcaaaccgagctgaagcatgtctctaggtggtggaaggactccggcttcagccagcttacgtttactaggcaccgccatgtggagttctacacactcgcttcttgcatcgcgattgagccgaagcactcagctttccggctgggttttgcgaaagtgtgttatcttggaattgtcttggacgatatctacgacacgttcggcaagatgaaggagcttgaattgtttactgccgctattaagcgctgggacccatccaccacagagtgcctcccggaatatatgaagggcgtctatatggccttctacaactgtgttaacgagctggcgctgcaggcagaaaagacgcaagggagggacatgctgaactacgcccgcaaggcttgggaggcgctcttcgatgcatttctggaggaagccaagtggatcagctctggctatcttcctactttcgaggaatacttggagaacggcaaggtgtccttcggatacagggcggcaacgctccagcctattcttactttggacatcccactcccgctgcacatccttcagcaaattgacttcccctcccgctttaacgatttggcttcatcgattcttcggttgagaggcgatatctgcgggtatcaagcagagaggtcgcgcggcgaggaagcctccagcatctcctgttacatgaaggacaatcccggatcgaccgaggaagatgcactgtcccatatcaacgccatgattagcgacaacatcaatgagcttaattgggaacttttgaagcctaacagcaatgtgcccatttcttcaaagaagcacgctttcgacatccttcgggcgttttaccatttgtataagtacagagatggcttctctatcgccaagattgagacgaagaacctcgtgatgaggactgtcctggagcctgttcccatgtaaggtaccaagctt

SEQ ID NO: 143 - protein, 453 aa, Artemisia annua
MDRAIERQRVLLEHLRPSSTSSSLENIDSSISASVCAAGDSSAYQRSTVFGDDVVIVAAYRTPLCKSKRGGLKDTYPDDILAPVLKAVIEKTNLNPAEVGDIVVGSVLGAGSQRASECRMAAFYAGFPETVPVRTVNRQCSSGLQAVADVAAAIKAGFYDIGIGAGLESMTANPMAWDGSVNPRVKTMAQAQDCLLPMGITSENVSQRFGVTRKEQDQAAVDSHRKAAAATASGKFKDEIIPVKTKIVDPKTGDEKPVTISVDDGIRPGTTLADLAKLKPVFKKDGSTTAGTSSQVSDGAGAVLLMKRSTALQKGLPILGVFRTFAAVGVPPAIMGIGPAVAIPAAVKAAGLEVNDIDLFEINEAFASQFLYCQKKLELDPQKINVNGGAMAIGHPLGATGARCVATLLHEMKRRGRDCRFGVVSMCIGTGMGAAAVFERGDACDDLSYAKAK

SEQ ID NO: 144 - protein, 458 aa, Artemisia annua
MGPQNVGILAMEIYFPPTCIQQDTLEDFDGVSKGKYTIGLGQDCMAFCSEVEDVISMGLTAVTSLLEKYGVDPKQIGRLEVGSETVIDKSKSIKTFLMTIFEDCGNTDIEGVDSTNACYGGTAALLNCVNWVESNSWDGRYGLVVCTDSAVYAEGPARPTGGAAAIAMLIGPDAPIAFESKFRASHMSHVYDFYKPDLASEYPVVDGKLSQTCYLMALESCYKGYCQKYEKLQGKQFSIADADYFVFHSPYNKLVQKSFARLVFSDVARSASSVDESAKEKLGQFTSLTGDESYNNRDLEKASQQVAKPHYDVKVQPGTLICKQVGNMYTASIYAAFASLIHNKNSSLDGNRVMMFSYGSGLSATMFSLRLSEGKAPFSLSNIAKVMNVDEKLKRRTELSPEKFVELMKVMEHRYGGKDFVTSKDTTLLAPDTYYLTEVDSKYRRYYAKKTSELANGQ

SEQ ID NO: 145 - protein, 458 aa, Artemisia annua
MAPQNVGIVAMEIYFPPTCIQQDTLENFDGVSKGKYTIGLGQDCMAFCSEVEDVISMGLTAVTSLLEKYEIDPKQIGRLEVGSETVIDKSKSIKTFLMDIFENAGNTDIEGVDSTNACYGGTAALFNCVNWVESSSWDGRYGLVVSTDSAVYADGPARPTGGAGAVAMLIGPDAPIAFESKFRASHMSHVYDFYKPDLASEYPVVDGKLSQTCYLMALDSCYKGYCQKYEKLQGKQFSMADADYFVFHSPYNKLVQKSFARLVFADVARDASSVDESAKEKLGQFTSLKGDESYQSRDLEKASQQVAKPDYDKKVQPATLIPKQLGNMYTASLYAAFASLIHNKSSSLDGNRVMMFSYGSGLSATMWSLRLTEGKAPFSLSNIAKVMNIEHKLKTRTEFAPEKFVELMHLMEHRYGGKDFVTSKDTSHLAPGTYYLTEVDSKYRRFYAKKTTEVANGH

SEQ ID NO: 146 - protein, 567 aa, Artemisia annua
MDLRRKLPPKPPSSTTTKQPSHRSHSPTPIPKASDALPLPLYLTNTFFFTLFFSVAYYLLHRWRDKIRSGTPLHVVTLTELSAIVLLIASFIYLLGFFGIDFVQSFTSRENEQLNNDDHNVVSTNNVLSDRRLVYDYGFDVTGDNDNDNDDDVIVKSVVSGEVNSYSLEASLGDCYRAAKIRKRAVERIVGREVLGLGFEGFDYESILGQCCEMPIGYVQVPVGVAGPLLLNGGEFMVPMATTEGCLVASTNRGCKAICLSGGATAILLKDGMTRAPVVRFATAERASQLKFYLEDGVNFDTLSVVFNKSSRFARLQNIQCSIAGKNLYIRFTCSTGDAMGMNMVSKGVQNVLDFLQNDFPDMDVIGISWKFCSDKKPTAVNWIEGRGKSVVFQAVITKKVVRKSALNPQTCTCRTLTCLRPLLVLLLLVLLVDLMHMLHIVSAVFIATGQDPAQNIESSHCITMMEAVNNGKDLHVNVTMPSIEVGTVGGGTQLASQSACLNLLGVKGACIESPGSNAQLLARIVAGSVLAGELSLMSAISAGQLVKSHMKYNRSSRDMSAIASKV

SEQ ID NO: 147 - protein, 566 aa, Artemisia annua
MDLRRKLPPKPPSTTTKQPSHRSHSPTPIPKASDALPLPLYLTNTFFFTLFFSVAYYLLHRWRDKIRSGTPLHVVTLTELSAIVLLIASFIYLLGFFGIDFVQSFISRENEQLNNDDHNVVSTNNVLSDRRLVYDYGFDVTGDNDDGNDDDVIVKSVVSGEVNSYSLEASLGDCYRAAKIRRRAVERIVGREVLGLGFEGFDYESILGQCCEMPIGYVQVPVGVAGPLLLNGGEFMVPMATTEGCLVASTNRGCKAICLSGGATAILLKDGMTRAPVVRFATAERASQLKFYLEDGVNFDTLSVVFNKSSRFARLQNIQCSIAGKNLYIRFTCSTGDAMGMNMVSKGVQNVLDFLQNDFPDMDVIGISGNFCSDKKPAAVNWIEGRGKSVVCEAVITEEVVRKVLKTTVPALVELNMLKNLTGSAIAGSLGGFNAHAANIVSAVFIATGQDPAQNIESSHCITMMEAVNNGKDLHVSVTMPSIEVGTVGGGTQLASQSACLNLLGVKGACIESPGSNAQLLARIVAGSVLAGELSLMSAISAGQLVKSHMKYNRSSRDMSAIASKV

SEQ ID NO: 148 - protein, 560 aa, Artemisia annua
MDLRRKLPPKPPSSTTTKQPSHRSHSPTPIPKASDALPLPLYLTNTFFFTLFFSVAYYLLHRWRDKIRSGTPLHVVTLTELSAIVLLIASFIYLLGFFGIDFVQSFISRENEQLNNDDHNVISTNNVLSDRRLVYDYDGFDNDDDVIVKSVVSGEVNSYSLEASLGDCYRAAKIRRRAVERIVGREVLGLGFEGFDYESILGQCCEMPIGYVQVPVGVAGPLLLNGGEFMVPMATTEGCLVASTNRGCKAICLSGGATAILLKDGMTRAPVVRFATAERASQLKFYLEDGVNFDTLSVVFNKSSRFARLQNIQCSIAGKNLYIRFTCSTGDAMGMNMVSKGVQNVLDFLQNDFPDMDVIGISGNFCSDKKPAAVNWIEGRGKSVVCEAVITEEVVRKVLKTTVPALVELNMLKNLTGSAIAGSLGGFNAHAANIVSAVFIATGQDPAQNIESSHCITMMEAVNNGKDLHVSVTMPSIEVGTVGGGTQLASQSACLNLLGVKGACIESPGSNAQLLARIVAGSVLAGELSLMSAISAGQLVKSHMKYNRSSRDMSAIASKV

SEQ ID NO: 149 - protein, 565 aa, Artemisia annua
MDLRRKLPPKPPSTTTKQPSHRSHSPTPIPKASDALPLPLYLTNTFFFTLFFSVAYYLLHRWRDKIRSGTPLHVVTLTELSAIALLIASFIYLLGFFGIDFVQSFISRENKQLNNDDHNVVSTNNVLSDRRLVYDYDGFDVTGDNDDDDDVIVKSVVSGEVNSYSLEASLGDCYRAAKIRRRAVERIVGREVLGLGFEGFDYESILGQCCEMPIGYVQVPVGVAGPLLLNGGEFMVPMATTEGCLVASTNRGCKAICLSGGATAILLKDGMTRAPVVRFATAERASQLKFYLEDGVNFDTLSVVFNKSSRFARLQNIQCSIAGKNLYIRFTCSTGDAMGMNMVSKGVQNVLDFLQNDFPDMDVIGISGNFCSDKKPAAVNWIEGRGKSVVCEAVITEEVVRKVLKTTVPALVELNMLKNLTGSAIAGSLGGFNAHAANIVSAVFIATGQDPAQNIESSHCITMMEAVNNGKDLHVSVTMPSIEVGTVGGGTQLASQSACLNLLGVKGACIESPGSNAQLLARIVAGSVLAGELSLMSAISAGQLVKSHMKYNRSSRDMSAIASKV

SEQ ID NO: 150 - protein, 585 aa, Artemisia annua
MDVRRRPVNKHQPINRSLKPSNAGELLKPQNQAKASDALPLPLYLTNGLFFTMFFSVMYFLLHRWRDKIRNGVPLHVVTLSELAALVSLVASAIYLLGFFGIDFVQSIIRSSPDSWDIEDDQAEQLMINEDKPIRPCGQALIPHIIPSTDDIMVEKKKPPPTIEYSSEEDEEIVKKVVDGLIPSYALESKLGDCKRAAGIRRVALERITGKSLSGLPLEGFDYESILGQCCEMPVGYVQIPVGIAGPLLLNGAEFSVPMATTEGCLVASTNRGCKAIYVSGGATCMLLKDGMTRAPVVRFGSAKRAAELKIFLEDPLNFDTLAVVFNKSSRFGRLQSIRCAIAGKNLYVRFCCSTGDAMGMNMVSKGVQNVLDFLHSDFPDMEVMGISGNYCSDKKPAAVNWIEGRGKSVVCEAVIKEEVVNKVLKTTVPALVELNMLKNLTGSAMAGALGGFNAHASNIVSAVYLATGQDPAQNVESSHCITMMEAVNDGKDLHISVTMPSIEVGTVGGGTQLASQSACLNLLGVKGASKDEPGSNSRVLATIVAGSVLAGELSLMSAISAGQLVKSHMKYNRSSRDMTKLTSS

SEQ ID NO: 151 - protein, 389 aa, Artemisia annua
MIMGEVRSRAPGKIILAGEHAVVHGSAAVAASIALYTSVHLRLHHPSDNDDTLRLHLMDVGLDFSWPTGRIKDILPDSVNSIASSPTTCSDETIKFIKTLVEDHKIPESQIGIVSGVIAFLWLYTCIQGNKPATVSVSSELPLGSGLGSSAAFCVSISGAFLALSDSSKVDFSREGWVSFGEKDQLLVNKWAFEGEKIIHGKPSGIDNTVSTYGNLIKFKSGALTCIKSNMTLKMLITNTKVGRNTKALVAGVSERKNRHPDAMTSVFTAVDSISNELASIIQSSSDDDLTALTKEQKVAELMEMNQGLLKCMGVSHASIEMVLRTTLKYKLTSKLTGAGGGGCVLTLLPALLSAAVIDEVIEELEQCGFQCLIADIGGNGLEICFNGR

SEQ ID NO: 152 - protein, 414 aa, Artemisia annua
MGSELEKWVLMVTARTPTNIAVIKYWGKRDETLILPINDSISVTLDPSHLCTTTTVSVSPTFDHDRMWLNGKEISLQGGRFQSCLREIRARAQDVEDEKKGIKIKKEDWQKLHLHIASYNNFPTAAGLAWLVFSLAKLMNLKEDNSQLSAIARQGSGSACRSLYGGFVKWDMGKEDNGSDSLAVQLADEKHWDELVIIIAVVSARQKETSSTSGMRDTVVTSALIEHRAKEVVPKRIVQMEDAIQKRDFPSFARLACTDSNQFHAVCLDTYPPIFYMNDTSHRIISCVEKWNRAEETPQVAYTFDAGPNAVMIARDRKTAALLLQRLLYNFPPQSDTDLDSYIIGDKSILQDAGIKNMKDVEALAPPPETKDNISTQRSKGDVSYFICTRPGGGPVVLSDESLALLDPLTGLPK

SEQ ID NO: 153 - protein, 713 aa, Artemisia annua
MALSAFAFPTQINHRSVTSNQPLIQHCLFGTDLNSSQKPFNQIVKRSNGIRSTLSERGEYHSQRPPTPLLDTINYPIHMKNLSVKELKQLADELRSDVIFNVSKTGGHLGSSLGVVELTVALHYVFNTPQDKILWDVGHQSYPHKILTGRRDQMHTIRQTNGLAGFTKRSESEHDCFGTGHSSTTISAGLGMAVGRDLKGGTNDVVAIIGDGAMTAGQAYEAMNNAGYLDSDMIVILNDNKQVSLPTANLDGPIPPVGALSSALSRLQSNRPLRELREVAKEVTKQIGGPMHELAAKVDEYARGMISGSGSTLFEELGLYYIGPVDGHSIDDLVAILKEVKSTKTTGPVLIHVITEKGRGYPYAEKAADKYHGVGKFDPATGKQFKSSAPTQSYTTYFAEALIAEAEADKKIVGIHAAMGGGTGMNLFLRRFPTRCFDVGIAEQHAVTFAAGLACEGLKPFCAIYSSFLQRGYDQVVHDVDLQKLPVRFAMDRAGLVGADGPTHSGSFDVTFMACLPNMVVMAPSDEAELFNMVATAAAIDDRPSCFRYPRGNGIGVPLPPGNKGVPLEVGKGRIMLEGQRVALLGYGTAVQSCMAAATIVQERGLNITVADARFCKPLDHSLIRALAKTHEVLITVEEGSIGGFGSHVAHFLALDGLLDGNLKWRPLVLPDRYIDHGAPADQLAEAGLTPSHIAATVFNVLGQTREALEVMS

SEQ ID NO: 154 - protein, 728 aa, Artemisia annua
MASCGALKGGFAPMAIAQDGYSSSNLLCSSIKSIVPSNKRKFKGVVAVAKDNAANDQEDLKLVNGSVTTTLKYSGEKPQTPILDTINYPVHMKNLSVEDLEKLADELREEIVYSVSKTGGHLSSSLGVVELTVSLHHVFNTPDDKIIWDVGHQAYPHKILTGRRSRMDTIRQTFGLAGFPKRDESQHDAFGAGHSSTSISAGLGMAVGRDLLGKDNHVIAVIGDGAMTAGQAYEAMNNAGYLDSNLIIVLNDNRQVSLPTATLDGPAPPVGALSRSLTRLQTSRKFRQLREAAKEVTKQLGDTTHEIASKIDSFVKGAVSGQGASMFEELGLYYIGPVDGHNLEDLVHIFKKLKSMETPGAVLVHLVTEKGKGYHPAEIAADKMHGVVKFDTQTGKQLKAKTKTLSYTQYFADSLVAEAQTDDKIVAIHAAMGGGTGLNTFQKHFPERCFDVGIAEQHAVTFAAGLATEGLKPFCAIYSSFLQRGYDQVVHDVDLQKLPVRFAMDRAGLVGADGPTHCGAFDTAFMACLPNMVVMAPSCESELMHMVATAAVIDDRPSCFRYPRGNGVGSPLPPNNKGSPLEIGRGRILKEGSRVALLGYGTIVQNCLKANELLQKIGIQVTVADARFCKPLDGNLIKQLVKEHEVLVTIEEASVGGFSSHVSHFLALNGLLDGNLKWRAMTLPDRYIDHGDHANQIEEAGLSPMHIAATVLSLIGESKERLLEAVNA

SEQ ID NO: 155 - protein, 472 aa, Artemisia annua
MSLNTLSPSEIRVNSFLDTTKSNTNLFKLQGGVSVKRKDSKVNGIQCSAAASTPPPAWPGTALVQPGTKNWSGPKPISIIGSTGSIGTQTLDIVAENPDKFKVVALAAGSNVTLLAEQIKAFKPQLVSIKNESLVAELKEALAGSDYMPEIIPGDEGVVEVARHPDCVTVVTGIVGCAGLKPTVAAIEAGKNIALANKETLIAGGPFVLPLAHKHNVKILPADSEHSAIFQCIQGFPEGALRRIILTASGGAFRDWPVEKLKDVKVADALKHPNWSMGRKITVDSATLFNKGLEVIEAHYLYGSSYDNIDIVIHPQSIIHSMVETQDSSVLAQLGWPDMRLPILYTLSWPDRVQCSEITWPRLDLCKLGSLTFKAPDNVKYPSMHLAYSAGRAGGTMTGVLSAANEKAVEMFLDEKIGYLDIFKVVELTCEKHQAELVTAPSLEEIIHYDLWAREYAASVKPSSSGLTPALV

SEQ ID NO: 156 - protein, 453 aa, Artemisia annua
MSLNFLCPTQINHQGGFSFKKKDVKVSLGKSIRCSAQPSPPPAWPGTALVDPGTKNWNGPKPISIVGSTGSIGTQTLDIVAENPDKFRVVAIAAGSNVALLAEQVKAFKPQLVSIRNESLVGELKEALADADYMPEIIPGEQGVIEVARHPDCVTVVTGIVGCAGLKPTVAAIEAGKNIALANKETLIAGGPFVLPLAHKHNVKILPADSEHSAIFQCIQGFPEGALRRIILTASGGAFRDLPVEKLKDVKVADALKHPNWSMGKKITVDSATLFNKGLEVIEAHYLYGSDYDNIEIVIHPQSIIHSMVETQDSSVIAQLGWPDMRLPILYTLSWPDRIPCSEITWPRLDLCKLGSLTFKEPDNVKYPSMDLAYSAGRAGGTMTGVLSAANEKAVEMFIDEKIRYLDIFKVVELTCEKHQAELVTAPSLEEIVHYDLWAREYAASVKPAAAIV

SEQ ID NO: 157 - protein, 302 aa, Artemisia annua
MILQVISPSSILIIPRRQVAPNSIYFHPQLSSSVKYSYSLPPKTNNFRQKNITCSANNPTVTTERSEDVVKEKSVSVVLLAGGKGKRMGASMPKQYLPLLGQPIALYSFYTFSRMPEVKEIVVVCDPSYQDIFEDAREKINVDLKFALPGKERQDSVYSGLQTIDLNSELVCVHDSARPLVTSSDVEKVLKDGLRVGASVLGVPAKATIKEGNSESFVVKTLDRKTLWEMQTPQVIKPELLKKGFELVNREGLEVTDDVSIVEHLKHPVYITEGSYTNIKVTTPDDLLLAERILNTASFVPA

SEQ ID NO: 158 - protein, 396 aa, Artemisia annua
MAAASSHLFYNNGISSKFNKSSITLKQSSFYHKNCRNFRTHLVVKASSSDNNDTKNGRKQVELVYNLDEKLNRLADEVDMNAGLSRLSLFSPCKINVFLRITNKRPDGFHDLASLFHVISLGDKIKFSLSPSKTTDRLSTNVPGIPLDERNLIIKALNLYRKKTGSDKFFWVHVDKKVPTGAGLGGGSSNAATALWAANQFSGCLATEQELQEWSGEIGSDVPFFFSNGAAYCTGRGEVVQDIPSPVPFDLPMVLIKPPEACSTAEVYKRFRLDVSSTADPLALLEKISKNGISQDVCINDLEPPAFEVLPSLKRLKQRIVAAGRGKYDAVFMSGSGSTIVGVGSPDPPQFLYDEEDYKDVFLSEANFITRTENQWYQEPSSSNTTSFVDQSSYAP

SEQ ID NO: 159 - protein, 226 aa, Artemisia annua
MATSTASSIYTTSPLHTTTKAFSTRLTTRRSSLTLRPTQHRAAAVVVNAAVETENIPAVKKDIPTKVLPFRVGHGFDLHRLEPGYPLIIGGIDIPHERGCEAHSDGDVLLHCVVDAILGALGLPDIGQIFPDSDPKWKGAASSVFIKEAVRLMDEAGYELGNLDATLILQRPKLSPHKENIRANLSALLGADPAVVNLKAKTHEKVDSLGENRSIAAHTVVLLMKK

SEQ ID NO: 160 - protein, 742 aa, Artemisia annua
MIMATGAAPASFMGLKSMENGLGFAKTSDFIKVSDVKRVKFHRTKISVIKNSNPGSDIAELRPASEGSPLLVPVQKYCESTYKTIRRKTRTVMVGDVPLGSDHPIRIQTMTTTDTKDVAATVEQVMQIADRGADIVRITVQGKREADACFEIKNTLVQKNYNIPLVADIHFAPSVALRVAECFDKIRVNPGNFADRRAQFEQLEYTEDDYQQELEHIEKVFTPLVEKCKKYGRAMRIGTNHGSLSDRIMSYYGDSPRGMVESAFEFARICRKLDFHNFVFSMKASNPVIMVQAYRLLVAEMNVQGWDYPLHLGVTEAGEGEDGRMKSAIGIGTLLQDGLGDTIRVSLTEPPEEEIDPCRKLANLGMKASQLQQGVAPFEEKHRRYFDFQRRTGDLPVQKEGEEVDYRGVLHRDGSVIMSVTLDQLKTPELFYRSLAAKLVLGMPFKDLATVDSILLRELPPADDKDARLALKRLIDVSMGIITPLSEQLTKPLPNAIVLVNLNELSTGAHKLLPEGTRLVVSVRGDEPYEELDILKTTDATMILHELPYAEEKTGRVHAARRLFEYLSENSLNFPVLHHIKFPKGIPRDDLVISAGANAGALLVDGLGDGILLEAPDQDFEFIRNTSFNLLQGCRMRNTKTEYVSCPSCGRTLFDLQVISAEIREKTSHLPGVSIAIMGCIVNGPGEMADADFGYVGGAPGKIDLYVGKTVVQRGIAMEGATDALIQLIKDHGRWVDPPVEE

SEQ ID NO: 161 - protein, 455 aa, Artemisia annua
MASLQLTPLSTRTDYLSLPADIKVFRCRKPLTVRCSGGDTSSSTQFDAKVFRHNLTRSENYNRKGFGHKKETLELMSQEYFSDIIKTLKENNYEYTWGNVTVKLAEAFGFCWGVERAVQIAYEARKQFPDDKIWITNQIIHNPTVNKRLEEMEVTDIPIDGGEKQFDVVDKGDVVILPAFGAAVDEMRILSNKEVQIVDTTCPWVTKVWNVVEKHKKGDYTSVIHGKHNHEETVATASFAGKFIVVKNIDEATYVCDYILGGKLNGSSSTKEAFMEKFKYAVSEGFDPDKDLVKAGIANQTTMLKGETEEIGKLLERTMMQKYGVENVNNHFLSFNTICDATQERQDAMYKLVDDKVDLMLVIGGFNSSNTSHLQEIAEERKIPSYWIDSEKRIGPGNRIAYKLLHGELVEQENWLPKGPITIGVTSGASTPDKVVEDALLKVFEIKREEALQLV

SEQ ID NO: 162 - protein, 454 aa, Artemisia annua
MASLQFTSFSSTYTKISQPDFKLVQFRKPLSVRCSAGDSSSPDFDAKVFRHNLTRSENYNRKGFGRKKETLELINQEFTSGDIIKTLKENNNEYTWGNVTVKLAEAYGFCWGVERAVQIAYEARKQFPDEKIWITNEIIHNPTVNKRLEEMEVKDIPVKDGEKQFDVVDKGDVVVLPAFGAAVNEMLTLSNKGVQIVDTTCPWVSKVWNSVEKHKKGDYTSIIHGKYSHEETVATASFAGKYVIVKNMDEATYVCDYILGGKLNGSSSTKEAFLEKFKFAVSKDFNPDTDLVKAGVANQTTMLKGETEEIGKLVERTMISKYGVENATEHFISFNTICDATQERQDAMYKLVEEKMDLMLVVGGWNSSNTSHLQEIPEDRGIPSYWVDSEQRVGPGNRITYKLMHGELVEKENWLPKGHVTIGVTSGASTPDKVVEDVLARVFEIKREEALQLV

SEQ ID NO: 163 - protein, 459 aa, Artemisia annua
MASLPFNPFSSTFCTILSQPEFKLFRCRKPLSIQCSTRDSSSPSLDFDANVFRHKLTRSENYNRKGFGRKKEALKQMDEEYNMFIDLLGDIIKTLKENNNEYTWGNVTVKLAEVYGFCWGVERVVQIAYEARKQFPDQKMWITNEILHNPTINKRLEEMEVKVIPVKDGVKQLDVIDKGDVVVFPAFGAAVNEMFTLSTKGVQIVDTTCPWVSKVWSSIEKHKKGDYTSIIHGNHTHEESVATASFAGKYVIVRNMDEATYVCDYILGGELNGTSSTKEAFLEKFKFAVSKDFNPDTDLVKTGVANQTTMLKGETEEIGRLVERTMMSKYGVENATEHFMSFNTICDATQERQDAMYKLVEEKIDLMLVVGGLDSSNASHLQEIPEDRGIPSYWIESEERVGPGNHIAYKLFHGELVEKHNWLPKGHVTIGVTAAASTPDKVVGDILMRVFEIKREESM

SEQ ID NO: 164 - protein, 343 aa, Artemisia annua
MSGIDLKSKFLKVYDTLKSELINDPAFEFDDDSRQWIEKMLDYNVPGGKLNRGLSVVDSYQLLKGGELSDDEIFLSSALGWCIEWLQAYFLVLDDIMDESHTRRGQPCWFRLPKVGMIAANDGILLRNHVPRILKKHFRGKPYYVDLVDLFNEVEFQTASGQMIDLITTLVGEKDLSKYSLSIHRRIVQYKTAYYSFYLPVACALLMFGEDLDKHVEVKNVLVEMGTYFQVQDDYLDCFGAPEVIGKIGTDIEDFKCSWLVVKALELANEEQKKVLHENYGKKDPASVAKVKEVYHTLNLQAVFEDYEATSYKKLITSIENHPSKAVQAVLKSFLGKIYKRQK

SEQ ID NO: 165 - protein, 342 aa, Artemisia annua
MSIDLKSKFLQVYDSLKSDLIHDPAFEFDDDSRNWVERMLDYNVPGGKLNRGLSVVDSYKLLKEEELTEDEVFLACTLGWCIEWLQAYFLVLDDIMDESHTRRGQPCWFRLPKVGMIAVNDGVVLRNHIPRILKKYFRGKAYYADLLDLFNEVEFQTASGQMIDLITTLVGQKELSKYSLSTHRRIVQFKTAYYSFYLPVACALLMFGENLDDHVQVKDVLVEMGTYFQVQDDYLDCFGAPEVIGKIGTDIEDFKCSWLVVKALELANEQQKKLLNENYGRKDQASVAKVKELYHTLNLQGVFEDYENKSHEKIIKSIETHPSKAVQEVLKSFLGKIYKRQK

SEQ ID NO: 166 - protein, 574 aa, Artemisia annua
MSTLPISSVSFSSSTSPLVVDDKVSTKPDVIRHTMNFNASIWGDQFLTYDEPEDLVMKKQLVEELKEEVKKELITIKGSNEPMQHVKLIELIDAVQRLGIAYHFEEEIEEALQHIHVTYGEQWVDKENLQSISLWFRLLRQQGFNVSSGVFKDFMDEKGKFKESLCNDAQGILALYEAAFMRVEDETILDNALEFTKVHLDIIAKDPSCDSSLRTQIHQALKQPLRRRLARIEALHYMPIYQQETSHDEVLLKLAKLDFSVLQSMHKKELSHICKWWKDLDLQNKLPYVRDRVVEGYFWILSIYYEPQHARTRMFLMKTCMWLVVLDDTFDNYGTYEELEIFTQAVERWSISCLDMLPEYMKLIYQELVNLHVEMEESLEKEGKTYQIHYVKEMAKELVRNYLVEARWLKEGYMPTLEEYMSVSMVTGTYGLMIARSYVGRGDIVTEDTFKWVSSYPPIIKASCVIVRLMDDIVSHKEEQERGHVASSIECYSKESGASEEEACEYISRKVEDAWKVINRESLRPTAVPFPLLMPAINLARMCEVLYSVNDGFTHAEGDMKSYMKSFFVHPMVV

SEQ ID NO: 167 - protein, 550 aa, Mentha piperita
MATNGVVISCLREVRPPMTKHAPSMWTDTFSNFSLDDKEQQKCSETIEALKQEARGMLMAATTPLQQMTLIDTLERLGLSFHFETEIEYKIELINAAEDDGFDLFATALRFRLLRQHQRHVSCDVFDKFIDKDGKFEESLSNNVEGLLSLYEAAHVGFREERILQEAVNFTRHHLEGAELDQSPLLIREKVKRALEHPLHRDFPIVYARLFISIYEKDDSRDELLLKLSKVNFKFMQNLYKEELSQLSRWWNTWNLKSKLPYARDRVVEAYVWGVGYHYEPQYSYVRMGLAKGVLICGIMDDTYDNYATLNEAQLFTQVLDKWDRDEAERLPEYMKIVYRFILSIYENYERDAAKLGKSFAAPYFKETVKQLARAFNEEQKWVMERQLPSFQDYVKNSEKTSCIYTMFASIIPGLKSVTQETIDWIKSEPTLATSTAMIGRYWNDTSSQLRESKGGEMLTALDFHMKEYGLTKEEAASKFEGLVEETWKDINKEFIATTNYNVGREIAITFLNYARICEASYSKTDGDAYSDPNVAKANVVALFVDAIVF

SEQ ID NO: 168 - protein, 580 aa, Picea abies; identical to SEQ ID NO: 116

SEQ ID NO: 169 - protein, 620 aa, Escherichia coli
MSFDIAKYPTLALVDSTQELRLLPKESLPKLCDELRRYLLDSVSRSSGHFASGLGTVELTVALHYVYNTPFDQLIWDVGHQAYPHKILTGRRDKIGTIRQKGGLHPFPWRGESEYDVLSVGHSSTSISAGIGIAVAAEKEGKNRRTVCVIGDGAITAGMAFEAMNHAGDIRPDMLVILNDNEMSISENVGALNNHLAQLLSGKLYSSLREGGKKVFSGVPPIKELLKRTEEHIKGMVVPGTLFEELGFNYIGPVDGHDVLGLITTLKNMRDLKGPQFLHIMTKKGRGYEPAEKDPITFHAVPKFDPSSGCLPKSSGGLPSYSKIFGDWLCETAAKDNKLMAITPAMREGSGMVEFSRKFPDRYFDVAIAEQHAVTFAAGLAIGGYKPIVAIYSTFLQRAYDQVLHDVAIQKLPVLFAIDRAGIVGADGQTHQGAFDLSYLRCIPEMVIMTPSDENECRQMLYTGYHYNDGPSAVRYPRGNAVGVELTPLEKLPIGKGIVKRRGEKLAILNFGTLMPEAAKVAESLNATLVDMRFVKPLDEALILEMAASHEALVTVEENAIMGGAGSGVNEVLMAHRKPVPVLNIGLPDFFIPQGTQEEMRAELGLDAAGMEAKIKAWLA

SEQ ID NO: 170 - protein, 398 aa, Escherichia coli
MKQLTILGSTGSIGCSTLDVVRHNPEHFRVVALVAGKNVTRMVEQCLEFSPRYAVMDDEASAKLLKTMLQQQGSRTEVLSGQQAACDMAALEDVDQVMAAIVGAAGLLPTLAAIRAGKTILLANKESLVTCGRLFMDAVKQSKAQLLPVDSEHNAIFQSLPQPIQHNLGYADLEQNGVVSILLTGSGGPFRETPLRDLATMTPDQACRHPNWSMGRKISVDSATMMNKGLEYIEARWLFNASASQMEVLIHPQSVIHSMVRYQDGSVLAQLGEPDMRTPIAHTMAWPNRVNSGVKPLDFCKLSALTFAAPDYDRYPCLKLAMEAFEQGQAATTALNAANEITVAAFLAQQIRFTDIAALNLSVLEKMDMREPQCVDDVLSVDANAREVARKEVMRLAS

SEQ ID NO: 171 - protein, 236 aa, Escherichia coli
MATTHLDVCAVVPAAGFGRRMQTECPKQYLSIGNQTILEHSVHALLAHPRVKRVVIAISPGDSRFAQLPLANHPQITVVDGGDERADSVLAGLKAAGDAQWVLVHDAARPCLHQDDLARLLALSETSRTGGILAAPVRDTMKRAEPGKNAIAHTVDRNGLWHALTPQFFPRELLHDCLTRALNEGATITDEASALEYCGFHPQLVEGRADNIKVTRPEDLALAEFYLTRTIHQENT

SEQ ID NO: 172 - protein, 283 aa, Escherichia coli
MRTQWPSPAKLNLFLYITGQRADGYHTLQTLFQFLDYGDTISIELRDDGDIRLLTPVEGVEHEDNLIVRAARLLMKTAADSGRLPTGSGANISIDKRLPMGGGLGGGSSNAATVLVALNHLWQCGLSMDELAEMGLTLGADVPVFVRGHAAFAEGVGEILTPVDPPEKWYLVAHPGVSIPTPVIFKDPELPRNTPKRSIETLLKCEFSNDCEVIARKRFREVDAVLSWLLEYAPSRLTGTGACVFAEFDTESEARQVLEQAPEWLNGFVAKGANLSPLHRAML

SEQ ID NO: 173 - protein, 159 aa, Escherichia coli
MRIGHGFDVHAFGGEGPIIIGGVRIPYEKGLLAHSDGDVALHALTDALLGAAALGDIGKLFPDTDPAFKGADSRELLREAWRRIQAKGYTLGNVDVTIIAQAPKMLPHIPQMRVFIAEDLGCHMDDVNVKATTTEKLGFTGRGEGIACEAVALLIKATK

SEQ ID NO: 174 - protein, 372 aa, Escherichia coli
MHNQAPIQRRKSTRIYVGNVPIGDGAPIAVQSMTNTRTTDVEATVNQIKALERVGADIVRVSVPTMDAAEAFKLIKQQVNVPLVADIHFDYRIALKVAEYGVDCLRINPGNIGNEERIRMVVDCARDKNIPIRIGVNAGSLEKDLQEKYGEPTPQALLESAMRHVDHLDRLNFDQFKVSVKASDVFLAVESYRLLAKQIDQPLHLGITEAGGARSGAVKSAIGLGLLLSEGIGDTLRVSLAADPVEEIKVGFDILKSLRIRSRGINFIACPTCSRQEFDVIGTVNALEQRLEDIITPMDVSIIGCVVNGPGEALVSTLGVTGGNKKSGLYEDGVRKDRLDNNDMIDQLEARIRAKASQLDEARRIDVQQVEK

SEQ ID NO: 175 - protein, 316 aa, Escherichia coli
MQILLANPRGFCAGVDRAISIVENALAIYGAPIYVRHEVVHNRYVVDSLRERGAIFIEQISEVPDGAILIFSAHGVSQAVRNEAKSRDLTVFDATCPLVTKVHMEVARASRRGEESILIGHAGHPEVEGTMGQYSNPEGGMYLVESPDDVWKLTVKNEEKLSFMTQTTLSVDDTSDVIDALRKRFPKIVGPRKDDICYATTNRQEAVRALAEQAEVVLVVGSKNSSNSNRLAELAQRMGKRAFLIDDAKDIQEEWVKEVKCVGVTAGASAPDILVQNVVARLQQLGGGEAIPLEGREENIVFEVPKELRVDIREVD

SEQ ID NO: 176 - protein, 299 aa, Escherichia coli
MDFPQQLEACVKQANQALSRFIAPLPFQNTPVVETMQYGALLGGKRLRPFLVYATGHMFGVSTNTLDAPAAAVECIHAYSLIHDDLPAMDDDDLRRGLPTCHVKFGEANAILAGDALQTLAFSILSDADMPEVSDRDRISMISELASASGIAGMCGGQALDLDAEGKHVPLDALERIHRHKTGALIRAAVRLGALSAGDKGRRALPVLDKYAESIGLAFQVQDDILDVVGDTATLGKRQGADQQLGKSTYPALLGLEQARKKARDLIDDARQSLKQLAEQSLDTSALEALADYIIQRNK

SEQ ID NO: 177 - protein, 735 aa, Chlamydomonas reinhardtii
MLRGAVSHGPAVADRAAAGPARCAAPVARGVRSAAPTRQRRAEASVNAPRAGPAGSYSGEWDKLSVEEIDEWRDVGPKTPLLDTVNYPVHLKNFNNEQLKQLCKELRSDIVHTVSRTGGHLSSSLGVVELTVAMHYVFNTPEDKIIWDVGHQAYGHKILTGRRKGMATIRQTNGLSGFTKRDESEYDPFGAGHSSTSISAALGMAVGRDVKGKKNSVIAVIGDGAITGGMAYEAMNHAGFLDKNMIVILNDNQQVSLPTQYNNKNQDPVGALSSALARLQANRPLRELREIAKGVTKQLPDVVQKATAKIDEYARGMISGTGSTLFEELGLYYIGPVDGHNLDDLIAVLSEVRSAETVGPVLVHVVTEKGRGYLPAETAQDKMHGVVKFDPRTGKQVQAKTKAMSYTNYFADALTAEAERDSRIVAVHAAMAGGTGLYRFEKKFPDRTFDVGIAEQHAVTFAAGLACEGLVPFCTIYSTFMQRGYDQIVHDVSLQKLPVRFAMDRAGLVGADGSTHCGAFDVTFMASLPHMITMAPSNEAELINMVATCAAIDDAPSCFRFPRGNGLGLDLAAYGISKDLKGVPLEVGKGVVRRQGKDVCLVAYGSSVNEALAAADMLERDGVSTTVIDARFCKPLDTKLIRSAAKEHPVMITIEEGSVGGFAAHVMQFLALEGLLDGGLKFRPMTLPDRYIDHGDYRDQLAMAGLTSQHIASTALTTLGRAKDAAKFSLSALQA

SEQ ID NO: 178 - protein, 770 aa, Botrycoccus braunii
MKSTSFLQKGSSTSLAALPGFGVPQSCRFARTRRVSLSRGTARRPMQPRADAIVREEVNLQTSPDKITVDEIELWPAKGGPETPYLDKVKVPAHLKSFRKDELKTVCRELRAEIINAVSATGGHLGSSLGVVELTVAIHYVFDCPEDKLVWDVGHQAYGHKILTGRRDKMHTIRQRDGLSGFTNRSESEYDAFGAGHSSTSISAALGMAVGRDLLGKDNHCIAVIGDGAITGGMAYEALNHAGFLGSEKIQGKGNNIGRTIVILNDNQQVSLPTQFNGEKQKPVGALADALSQVASKQLSNSAKEIVKQLPEPLQAVGGQLEKVVSTIGGNNTFFDELGVAHVGPIDGHNVEDLVNVLEWIKSQKDGGPVIVHILTEKGYGYEFAEKASDRMHGVAKYDVTSGKQVKSSSKVASYTTYFADSLIAEAERDGRVIGIHAAMGGGTGMNRFAKRFPKRTFDVGIAEQHAVTFAAGLACEGLIPMCAIYSSFLQRAYDQVIHDVALQNLPVRFAMDRAGLVGADGATHSGFADVTYMACVPNMIVMAPSNEAELCNAVATSIAIDFAPSCFRFPRGNGIGVDLAEYGVQPNFKGTPWEIGKGKIRRNGSNNKPEGDVALLGYGTVVNDCLAAAEMLEAQGIKTTVADMRFCKPLDEELIVQLAKNHPVVITVEENTVGGFASHVLHFMTEQGFLDGKMKLRTLLLPDRFIEHGTQQQQLEEALLTANDIVETAVNALGIAPVPQIIIPPQQVVTPPQAVSPPQVATPTPAPLN

SEQ ID NO: 179 - protein, 771 aa, Botrycoccus braunii
MSTFSVAGMTSQFQRGSSSRMQHGSSVVGRGILPLPLNAGRSRVIFQRGSYKCSSNNGSVDGNNTVKVQRTYSKTYDLPDSEDGYGLWDKITTDEIEEWNNGPETPLLDTIKSPLGLKNYSMPELRALCKELRADIIHTVSQTGGHLGSSLGVAELTVALHYVFNCPYDKIIWDVGHQAYGHKILTGRRAQMPTIRQYKGLSGFTKRSESEYDAFGAGHSSTSISAALGMAVGRDFKNQNNHAIAVIGDGAITGGMAYEALNHAGFMKTDKMIVILNDNKQVSLPTQYNAGDQKPVGALAATLAEIQADPNLREIRETIKNFAEQMPAPIRDFAKAVDDVGHDILSQNSGAKLFKDLKLWYIGPVDGHDVGLLVKVLQDVKKRPDMGPVLIHILTEKGRGYEPAETSMDRMHGVGKYDTKTGKALPSTSKSKSYTNVYADSLAAEAALDPKILAVHAAMGGGTGMNRFEKRFASRTFDVGIAEQHAVTFAAGLASEGLKPFCAIYSTFLQRAFDQIIHDVALQNLPVRFAIDRGGLVGADGATHGGFADVTYMACVPNMVVMAPSNEAELCHAVATAAAYNDGPSCFRFPRGDGIGVDMEAEGVDPKSFKGQPWEIGKGVIRRLGKHAALLGYGTMVNDCLAAAEELAKKGIDVAVMDMRFCKPLDTQLVEQAAKNYPIVITVEENAIGGFGSHVANHLVKTGLLDTAVKFRSMILPDRYIDHGTQAQQREEAGLNTTTIVAKVESLMPYNSNNGVHANGVHANGVHANGV

SEQ ID NO: 180 - protein, 730 aa, Botrycoccus braunii
MAGNFFLCRVSSSNPTVSSLTGPVDCSPWPVIRKCRRVTGKNAVVRGPVQPSAFKVYAKSNGRQNGNKDWRKPKTPLLDTVQNPMHLKNFNKQQLRQLCEELRQDIISSVSTTGGHLGSSLGVVELTVALHYVFNAPYDRIIWDVGHQAYGHKILTGRRDRMNTIRQSGGLSGFTNRSESDYDAFGAGHSSTSISAAVGMAIGLDIKGMRNHSIAVIGDGAITGGMAYEAMNHAGFENVKNLIIILNDNQQVSLPTHYNGQQQSPVGALSATLAKLQTNKGLLELRERVKAFTKTLPAPLQDATAKMDEYARGMISGVASTLFEELGCFYVGPIDGHDVSQLVDILRDLKETPVQGPVLLHVRTQKGQGYKFAEEASDRMHGVGKYDPETGEQFKGAEKTPSYTHFFADALIAEAELDSRVQGIHAAMGGGTGMNRFAKRFQSRTYDVGIAEQHAVTFAAGLACEGLVPVVAIYSSFLQRGYDQVIHDVALQSLPVRFAMDRAGLVGADGATHSGFADVTFMGCLPNMVVMAPSNEAELCNALATAIAYDEGPSCFRFPRGNGIGVDLAEFGVAPNYKGRPWVLGKASIRRSGKDVAFLAYGTVVNDCLAAAEMLAANGVSATVVDMRFCKPLDKEIVKRCAKEHPVVITVEENAIGGFGSHVLHCLALEGLLDTNVKVRPMVLPDRFIEHATQQEQLATAGLDAAHIFATAIKTLGLPYNAPAVLAGAL

SEQ ID NO: 181 - protein, 479 aa, Botrycoccus braunii
MQAQVMDGKFCCTSSATQELHGFRRASLRLPNRKASVNQKRKATIQAIKLPEGLSDSVPPAWPGQIDVCSLPENRGVKKFSVLGSTGSIGTQTLDIVREHGDRFEVLALAAGGNVPLLAEQIREFKPKLVAIRDASKLGELKEAIKDVQPQPEILVGDEGAIEVARYADIDAVVTGIVGCAGLQPTCAAIRAGKDICLANKETLIAGGPYVLPLAKQHHVHILPADSEHSAIFQCLQGLPEGGMRRLILTASGGAFRDWPVEKLVEVTPALAVTHPNWSMGPKITVDSATLMNKGLEVIEAHYLYGASYDNIEIIIHPQSIIHSMVETQDSSVLAQLGWPDMRLPILYTMSWPERVPCSEVTWPRLDFTKANNLTFKAPDHKKYPSMALAYAAGRAGGTATAVMSAANEKAVAVFLEGKIGYLDIVPLVEATCEAHVPELKGAPTIEDIVYFDGWARRWAEENASKYNSANASRPLVAV

SEQ ID NO: 182 - protein, 298 aa, Botrycoccus braunii
MFSEFLWISHVQPTLCFAFLGQGCPARLKMFRTASNPIQRKAGRRLQVLALQQGEVKVRDGSVTVVLLAGGVGKRIGASIPKQYLELLGKPIATYSLATFAEMPEVGQIVIVCDPSYRPLFEAACKGLRRVPKISWALPGAERQDSVFNGFQEMDAGAELVAIHDSARPLVLASDVRACFMDALQVGAAVLGVPVKPTIKEVGKDGRVVKTLQRSSLWEVQTPQVIRPPLLSQGFDLVKKENLEVTDDVSIIEALGLPVVVTSGSYTNIKVTTPDDMSVAERFLSESKPAVAATAAAA

SEQ ID NO: 183 - protein, 357 aa, Botrycoccus braunii
MSVLTLRCSQPLHAKLPRAEFRDHGRLLLSNQNRSTVRRAQVRRFSTVKASATTALTVFSPSKINLFLRVVRRREDGYHDLASLFHVIDLGDSLAFTPLPGASQDQLTCNMEGVPTDSSNLVIKALDLFRRKTGVSNFYNIALEKVVPHGAGLGGGSGNAAAALWAANELSGRPATDAQLSEWAGEIGSDISVFFSNGAAYCTGRGEVVEDVKPPLPLDTPLLLVKPAEGLSTPEVFRALDLNSRSTADPLNLLARLGEGQATPELCINDLEPPAFSKMPALLALKERLIKEGGNRFSAVFMSGSGSTIVCVGSDEPPAFLSEPQYKSLFVAPARLIARKPGDWYQPSTPALLNVAA

SEQ ID NO: 184 - protein, 239 aa, Botrycoccus braunii
MSHVSTSLNGACRWAATSQLCRRSRLVRSAVQVPKKRDFDQRSKSHNAAQHMRTSAAAVELEAPPSQGEAWPAPPSLAYRVGHGFDLHRLEEGPYKLILGGIEIPHDRGCIAHSDGDALLHTITDAILGALGQPDIGQLFPDNDPKWKGQTSDVFVKEAVRLMREAGYVMGNLDATIILQKPKLSPHKETIRLNLCRLLEAHPSTVNLKAKTHEKVDSLGENRSIGCHAVVMLIRKDVA

SEQ ID NO: 185 - protein, 737 aa, Botrycoccus braunii
MAAAEALGAHAPVSLLPKTSPKIATKQIRRSGRQQMSLKTRFCVQATATQDPTLVLDPSKIVLPKYCESTYKTVRRPTRTIYIGKVPVGSEHPIRLQTMTTTDTRNVEATVDQVKKCVDVGADFVRITVQGKKEADACMQIRERLFKDRYDVPLVADIHFQPKVALAVAEAFEKIRINPGNFADGRKSFEVINYDDPAQFTREQEEIRELFTPLVEKCKSLNRAIRIGTNHGSLSARILSYYGDTPRGMVNSAFEFAEICRDLDFHNFLFSMKASNPLVMVQAYRLLAEEMYNKGWDYPLHLGVTEAGEGEDGRMKSAIGIGSLLMDGLGDTIRVSLTEDPEFEIVPCGQLANFGARAAKENWGVAPFTEVYRDTHSFARRTGRLPEQREGDQLDFRSLLHRDGSVLSFVPLEELKQPELLYRKLGAKLVVGMPFKDLATSDTLMLPEVPPSSDVEGRRALARLQEVGVHVVAPLAALAKDPLPNAVALVSLRDYAAKGVTLPEGAARFAITADGTESDAEVEALKDSKAVMVLLDVKKGVSRVHASRHFFELLRFYDIDLPVIHTRRFPAGLTRDEIVLTCGAEIGALLVDGLGDGVLLDCPTEDLDFIRTMSFGLLQGSRMRNTKTEYVSCPSCGRTLFDLQEVTEQIRVRTGHLPGVSIAIMGCIVNGPGEMADADFGYVGGRPGLIDLYVGKEVVRKNIPMEDATNQLIELIKEYGRWVDKEEEEVAQELQVA

SEQ ID NO: 186 - protein, 502 aa, Botrycoccus braunii
MQVLPQTRVQGVPSGRNLSCSKAVGGTPLRALTRDVVRPARSVNVHVVADGESADDVLLRSSSVAVAEKPKVSGRAFRRSLKDTGRYVAKPINDKDSLDLMEEHGVGYSSVGLVAQMRANNNEWRFKDIRVKLASAYGYCWGVERAVQMAYEAKKKYPDRQIHLTNEIIHNPTVNERMTEMDINIIEQKENGSKDFSKVSRQDVVILPAFGASVQELSLLKDLEVQIVDTTCPWVSKVWTAVDNQARKAHTSVIHGKYSHEETIATASFAETYLIVRDIEEANYVCNYILNGGNKEEFLTKFKNAISKGFDPDRDLARVGLANQTTMLRDETMAIGKLLEKTMIQKHGPAAIKEHFMVMDTICDATQERQDAVYQLVGQQDNPAEKLDLILVVGGFNSSNTSHLQEIPELKNIPSFWVNEAACIDPVNKKITHRTAHGTMLDTQNWLPDGPVTIGVTSGASTPDRAVEEVLEAVFKTRDASFGGIAPNYDLGTAPVVRHEEH

SEQ ID NO: 187 - protein, 362 aa, Botrycoccus braunii
MAALAAPAVEVNGTGVKTSSAGKGRREEFLDVYQVLRGQLLDDELIVGQPGFSRDYFGEMLDYNVPHGKLNRGTAVADAVEAIKGKAATKEDIFKADVAGWCVEWLQAFFLVADDIMDGSVTRRGQPCWFRQPHVGLVACNDYILLETCIYRILKINFGGTPQYIQLVDLMHDVTHQTAHGQMLDVKTAPIGTVDLTRYTLPTYLRIVTYKTAFYSFYLPVAYGMVLGGITNPKAYQLALDISVEMGQYFQIQDDYLDCFGDPKVIGKVGTDIQDNKCSWLIVQALLRASPEQKKILEENYGKDDEKAIAKVKALYRDLDLEGVFQKYEQESYEKLQKLIYSQNDLPALFTSMLAKIYKRSK

SEQ ID NO: 188 - protein, 288 aa, Saccharomyces cerevisiae
MTADNNSMPHGAVSSYAKLVQNQTPEDILEEFPEIIPLQQRPNTRSSETSNDESGETCFSGHDEEQIKLMNENCIVLDWDDNAIGAGTKKVCHLMENIEKGLLHRAFSVFIFNEQGELLLQQRATEKITFPDLWTNTCCSHPLCIDDELGLKGKLDDKIKGAITAAVRKLDHELGIPEDETKTRGKFHFLNRIHYMAPSNEPWGEHEIDYILFYKINAKENLTVNPNVNEVRDFKWVSPNDLKTMFADPSYKFTPWFKIICENYLFNWWEQLDDLSEVENDRQIHRML

SEQ ID NO: 189 - protein, 352 aa, Saccharomyces cerevisiae; identical to SEQ ID NO: 107

SEQ ID NO: 190 - protein, 281 aa, Artemisia annua
MLKFSPFKTIATATKLFPTHFKSLPKSQLLFPSSVTVPLRRRYSALTAAMGDDSGMDAVQRRLMFDDECILVDESDNVVGHDTKYNCHLMEKIETGKMLHRAFSVFLFNSKYELLLQQRSGTKVTFPLVWTNTCCSHPLYRESELISEDVLGVRNAAQRKLLDELGIPAEDVPVDQFTPVSRMLYKAPSDGKWGEHELDYLLFIVRDVAVNPNPDEVAAIKFVNQEELKELLRKADAGEEGLKLSPWFRLVVDNFLYKWWDHVQKGSLSEAIDMKTIHKLL

SEQ ID NO: 191 - protein, 284 aa, Artemisia annua
MAETLVSKCSSQFTKLSSFSLTSSSSNLYQRQFVTFKPRSSFSASVSSSTTILTDADSNMDAVQRRLMFEDECILVDANDAVVGHDTKYNCHLMEKIQSENLLHRAFSVFLFNSKYELLLQQRSATKVTFPLVWTNTCCSHPLYRESELIEENYLGVRNAAQRKLLDELGIPSDELPVNEFIPLGRILYKAPSDGKWGEHELDYLLFIVRDVSMAPNPDEVAEVKYVNREQLKELVMKADLGEEGLKLSPWFRIVVDNFLFKWWDHVENGSLLEACDMKTIHNL

SEQ ID NO: 192 - protein, 182 aa, Escherichia coli
MQTEHVILLNAQGVPTGTLEKYAAHTADTRLHLAFSSWLFNAKGQLLVTRRALSKKAWPGVWTNSVCGHPQLGESNEDAVIRRCRYELGVEITPPESIYPDFRYRATDPSGIVENEVCPVFAARTTSALQINDDEVMDYQWCDLADVLHGIDATPWAFSPWMVMQATNREARKRLSAFTQLK

We claim:

1. A method of increasing production of at least one terpenoid, the method comprising expressing in a plant cell a set of heterologous nucleic acids that encode polypeptides comprising enzymes necessary to carry out the mevalonic acid pathway or the methylerythritol 4-phosphate pathway, wherein production of the at least one terpenoid is increased when compared to a wild-type plant cell not encoding the set of heterologous nucleic acids.

2. The method of claim 1, wherein both the mevalonic acid pathway and the methylerythritol 4-phosphate pathway are expressed from heterologous nucleic acids.

3. The method of claim 1, further comprising expressing at least one heterologous nucleic acid encoding at least one polypeptide selected from the group consisting of isopentenyl-diphosphate delta-isomerase, farnesyl diphosphate synthase, and farnesene synthase.

4. The method of claim 2, further comprising expressing at least one heterologous nucleic acid encoding at least one polypeptide selected from the group consisting of isopentenyl-diphosphate delta-isomerase, farnesyl diphosphate synthase, and farnesene synthase is expressed.

5. The method of claim 1, wherein enzymes from the mevalonic acid pathway, the methylerythritol 4-phosphate, and an isopentenyl-diphosphate delta-isomerase, a farnesyl diphosphate synthase, and a farnesene synthase are expressed.

6. The method of claims 1-5, further comprising exposing the plant cell to an elicitor of sesquiterpene production.

7. The method of claim 6, wherein the elicitor is selected from the group consisting of methyl jasmonate, salicylic acid, ethephon and benzothiadiazole.

8. The method of claim 7, wherein the elicitor is methyl jasmonate.

9. The method of claim 3-5, wherein the isopentenyl-diphosphate delta-isomerase is expressed and is an isopentenyl-diphosphate delta-isomerase I or isopentenyl-diphosphate delta-isomerase II.

10. The method of claim 3-5, wherein the, wherein the farnesene synthase is expressed and is an α-farnesene synthase or a β-farnesene synthase.

11. The method of any of claims 1-5, wherein the at least one terpenoid is a sesquiterpenoid.

12. The method of claim 11, wherein the sesquiterpenoid comprises farnesene.

13. The method of any of claims 1-5, wherein the set of heterologous nucleic acids encoding enzymes of the mevalonic acid pathway comprises nucleic acids encoding a(n):
a. acetyl-CoA acetyltransferase,
b. 3-hydroxy-3-methylglutaryl coenzyme A synthase,
c. 3-hydroxy-3-methylglutaryl-coenzyme A reductase,
d. mevalonate kinase,
e. phosphomevalonate kinase, and
f. mevalonate pyrophosphate decarboxylase;
and wherein the set of heterologous nucleic acids encoding enzymes of the methylerythritol 4-phosphate pathway comprises nucleic acids encoding a(n):
g. 1-deoxy-D-xylulose-5-phosphate synthase,
h. 1-deoxy-D-xylulose 5-phosphate reductoisomerase,
i. 4-diphosphocytidyl-2-C-methyl-D-erythritol synthase,
j. 4-diphosphocytidyl-2-C-methyl-D-erythritol kinase,
k. 2-C-methyl-D-erythritol 2,4-cyclodiphosphate synthase,
l. 4-hydroxy-3-methylbut-2-en-1-yl diphosphate synthase, and
m. 4-hydroxy-3-methyl but-2-enyl diphosphate reductase.

14. The method of claim 13, wherein at least two of the heterologous nucleic acids are introduced into the plant cell on a single recombinant DNA construct.

15. The method of claim 14, wherein the recombinant DNA construct is a mini-chromosome.

16. The method of claim 15, wherein at least the enzymes of the mevalonic acid pathway or the methylerythritol 4-phosphate pathway are comprised on a single mini-chromosome.

17. The method of claim 15 Error! Reference source not found. Error! Reference source not found., wherein the enzymes of the mevalonic acid pathway and the methylerythritol 4-phosphate pathway are comprised on a single mini-chromosome.

18. The method of claim 16 or 17, wherein the mini-chromosome further comprises heterologous nucleic acids encoding polypeptides comprising at least one enzyme selected from the group consisting of isopentenyl-diphosphate delta-isomerase, farnesyl diphosphate synthase and farnesene synthase.

19. The method of claim 13, wherein the set of heterologous nucleic acids encoding enzymes of the mevalonic pathway comprise nucleic acids encoding a(n):
a. acetyl-CoA acetyltransferase having at least 70% sequence identity to at least one amino acid sequence selected from the group consisting of SEQ ID NOs:1-4, 143;
b. 3-hydroxy-3-methylglutaryl coenzyme A synthase having at least 70% sequence identity to at least one amino acid sequence selected from the group consisting of SEQ ID NOs:5-9, 144, 145;
c. 3-hydroxy-3-methylglutaryl-coenzyme A reductase having at least 70% sequence identity to at least one amino acid sequence selected from the group consisting of SEQ ID NOs:10-16, 17-20, 146-150;
d. mevalonate kinase, having at least 70% sequence identity to at least one amino acid sequence selected from the group consisting of SEQ ID NOs:21-26, 151;
e. phosphomevalonate kinase, having at least 70% sequence identity to at least one amino acid sequence selected from the group consisting of SEQ ID NOs:27-33 and
f. mevalonate pyrophosphate decarboxylase having at least 70% sequence identity to at least one amino acid sequence selected from the group consisting of SEQ ID NOs:34-40, 152;
and wherein the set of heterologous nucleic acids encoding enzymes of the methylerythritol 4-phosphate pathway comprise nucleic acid encoding a:
g. 1-deoxy-D-xylulose-5-phosphate synthase, having at least 70% sequence identity to at least one amino acid sequence selected from the group consisting of SEQ ID NOs:41-49, 153, 154, 169, 177-180;
h. 1-deoxy-D-xylulose 5-phosphate reductoisomerase, having at least 70% sequence identity to at least one amino acid sequence selected from the group consisting of SEQ ID NOs:50-58, 155, 156, 170, 181;
i. 4-diphosphocytidyl-2-C-methyl-D-erythritol synthase, having at least 70% sequence identity to at least one amino acid sequence selected from the group consisting of SEQ ID NOs:59-67, 157, 171, 182;
j. 4-diphosphocytidyl-2-C-methyl-D-erythritol kinase, having at least 70% sequence identity to at least one amino acid sequence selected from the group consisting of SEQ ID NOs:68-73, 158, 172, 183;
k. 2-C-methyl-D-erythritol 2,4-cyclodiphosphate synthase, having at least 70% sequence identity to at least one amino acid sequence selected from the group consisting of SEQ ID NOs:74-82, 159, 173, 184;
l. 4-hydroxy-3-methylbut-2-en-1-yl diphosphate synthase, and having at least 70% sequence identity to at least one amino acid sequence selected from the group consisting of SEQ ID NOs:83-89, 160, 174, 185; and
m. 4-hydroxy-3-methylbut-2-enyl diphosphate reductase having at least 70% sequence identity to at least one amino acid sequence selected from the group consisting of SEQ ID NOs:90-97, 161-163, 175, 186.

20. The method of claim 13, wherein the set of heterologous nucleic acids encoding enzymes of the mevalonic acid pathway comprises nucleic acids encoding:
a. acetyl-CoA acetyltransferase having at least 80% sequence identity to at least one amino acid sequence selected from the group consisting of SEQ ID NOs:1-4, 143;
b. 3-hydroxy-3-methylglutaryl coenzyme A synthase having at least 80% sequence identity to at least one amino acid sequence selected from the group consisting of SEQ ID NOs:5-9, 144, 145;
c. 3-hydroxy-3-methylglutaryl-coenzyme A reductase having at least 80% sequence identity to at least one amino acid sequence selected from the group consisting of SEQ ID NOs:10-16, 17-20, 146-150;
d. mevalonate kinase, having at least 80% sequence identity to at least one amino acid sequence selected from the group consisting of SEQ ID NOs:21-26, 151;
e. phosphomevalonate kinase, having at least 80% sequence identity to at least one amino acid sequence selected from the group consisting of SEQ ID NOs:27-33 and
f. mevalonate pyrophosphate decarboxylase having at least 80% sequence identity to at least one amino acid sequence selected from the group consisting of SEQ ID NOs:34-40, 152;
and wherein the set of heterologous nucleic acids encoding enzymes of the methylerythritol 4-phosphate pathway comprise nucleic acid encoding a:
g. 1-deoxy-D-xylulose-5-phosphate synthase, having at least 80% sequence identity to at least one amino acid sequence selected from the group consisting of SEQ ID NOs:41-49, 153, 154, 169, 177-180;
h. 1-deoxy-D-xylulose 5-phosphate reductoisomerase, having at least 80% sequence identity to at least one amino acid sequence selected from the group consisting of SEQ ID NOs:50-58, 155, 156, 170, 181;
i. 4-diphosphocytidyl-2-C-methyl-D-erythritol synthase, having at least 80% sequence identity to at least one amino acid sequence selected from the group consisting of SEQ ID NOs:59-67, 157, 171, 182;
j. 4-diphosphocytidyl-2-C-methyl-D-erythritol kinase, having at least 80% sequence identity to at least one amino acid sequence selected from the group consisting of SEQ ID NOs:68-73, 158, 172, 183;
k. 2-C-methyl-D-erythritol 2,4-cyclodiphosphate synthase, having at least 80% sequence identity to at least one amino acid sequence selected from the group consisting of SEQ ID NOs:74-82, 159, 173, 184;
l. 4-hydroxy-3-methylbut-2-en-1-yl diphosphate synthase, and having at least 80% sequence identity to at least one amino acid sequence selected from the group consisting of SEQ ID NOs:83-89, 160, 174, 185; and
m. 4-hydroxy-3-methylbut-2-enyl diphosphate reductase having at least 80% sequence identity to at least one amino acid sequence selected from the group consisting of SEQ ID NOs:90-97, 161-163, 175, 186.

21. The method of claim 13, wherein the set of heterologous nucleic acids encoding enzymes of the mevalonic acid pathway comprises nucleic acids encoding:
a. acetyl-CoA acetyltransferase having at least 90% sequence identity to at least one amino acid sequence selected from the group consisting of SEQ ID NOs:1-4, 143;
b. 3-hydroxy-3-methylglutaryl coenzyme A synthase having at least 90% sequence identity to at least one amino acid sequence selected from the group consisting of SEQ ID NOs:5-9, 144, 145;
c. 3-hydroxy-3-methylglutaryl-coenzyme A reductase having at least 90% sequence identity to at least one amino acid sequence selected from the group consisting of SEQ ID NOs:10-16, 17-20, 146-150;
d. mevalonate kinase, having at least 90% sequence identity to at least one amino acid sequence selected from the group consisting of SEQ ID NOs:21-26, 151;
e. phosphomevalonate kinase, having at least 90% sequence identity to at least one amino acid sequence selected from the group consisting of SEQ ID NOs:27-33 and
f. mevalonate pyrophosphate decarboxylase having at least 90% sequence identity to at least one amino acid sequence selected from the group consisting of SEQ ID NOs:34-40, 152;
and wherein the set of heterologous nucleic acids encoding enzymes of the methylerythritol 4-phosphate pathway comprise nucleic acid encoding a:
g. 1-deoxy-D-xylulose-5-phosphate synthase, having at least 90% sequence identity to at least one amino acid sequence selected from the group consisting of SEQ ID NOs:41-49, 153, 154, 169, 177-180;
h. 1-deoxy-D-xylulose 5-phosphate reductoisomerase, having at least 90% sequence identity to at least one amino acid sequence selected from the group consisting of SEQ ID NOs:50-58, 155, 156, 170, 181;
i. 4-diphosphocytidyl-2-C-methyl-D-erythritol synthase, having at least 90% sequence identity to at least one amino acid sequence selected from the group consisting of SEQ ID NOs:59-67, 157, 171, 182;
j. 4-diphosphocytidyl-2-C-methyl-D-erythritol kinase, having at least 90% sequence identity to at least one amino acid sequence selected from the group consisting of SEQ ID NOs:68-73, 158, 172, 183;
k. 2-C-methyl-D-erythritol 2,4-cyclodiphosphate synthase, having at least 90% sequence identity to at least one amino acid sequence selected from the group consisting of SEQ ID NOs:74-82, 159, 173, 184;
l. 4-hydroxy-3-methylbut-2-en-1-yl diphosphate synthase, and having at least 90% sequence identity to at least one amino acid sequence selected from the group consisting of SEQ ID NOs:83-89, 160, 174, 185; and
m. 4-hydroxy-3-methylbut-2-enyl diphosphate reductase having at least 90% sequence identity to at least one amino acid sequence selected from the group consisting of SEQ ID NOs:90-97, 161-163, 175, 186.

22. The method of claim 13, wherein the set of heterologous nucleic acids encoding enzymes of the mevalonic acid pathway comprises nucleic acids encoding:
a. acetyl-CoA acetyltransferase having at least 95% sequence identity to at least one amino acid sequence selected from the group consisting of SEQ ID NOs:1-4, 143;
b. 3-hydroxy-3-methylglutaryl coenzyme A synthase having at least 95% sequence identity to at least one amino acid sequence selected from the group consisting of SEQ ID NOs:5-9, 144, 145;
c. 3-hydroxy-3-methylglutaryl-coenzyme A reductase having at least 95% sequence identity to at least one amino acid sequence selected from the group consisting of SEQ ID NOs:10-16, 17-20, 146-150;
d. mevalonate kinase, having at least 95% sequence identity to at least one amino acid sequence selected from the group consisting of SEQ ID NOs:21-26, 151;
e. phosphomevalonate kinase, having at least 95% sequence identity to at least one amino acid sequence selected from the group consisting of SEQ ID NOs:27-33 and
f. mevalonate pyrophosphate decarboxylase having at least 95% sequence identity to at least one amino acid sequence selected from the group consisting of SEQ ID NOs:34-40, 152;
and wherein the set of heterologous nucleic acids encoding enzymes of the methylerythritol 4-phosphate pathway comprise nucleic acid encoding a:
g. 1-deoxy-D-xylulose-5-phosphate synthase, having at least 95% sequence identity to at least one amino acid sequence selected from the group consisting of SEQ ID NOs:41-49, 153, 154, 169, 177-180;
h. 1-deoxy-D-xylulose 5-phosphate reductoisomerase, having at least 95% sequence identity to at least one amino acid sequence selected from the group consisting of SEQ ID NOs:50-58, 155, 156, 170, 181;
i. 4-diphosphocytidyl-2-C-methyl-D-erythritol synthase, having at least 95% sequence identity to at least one amino acid sequence selected from the group consisting of SEQ ID NOs:59-67, 157, 171, 182;
j. 4-diphosphocytidyl-2-C-methyl-D-erythritol kinase, having at least 95% sequence identity to at least one amino acid sequence selected from the group consisting of SEQ ID NOs:68-73, 158, 172, 183;
k. 2-C-methyl-D-erythritol 2,4-cyclodiphosphate synthase, having at least 95% sequence identity to at least one amino acid sequence selected from the group consisting of SEQ ID NOs:74-82, 159, 173, 184;
l. 4-hydroxy-3-methylbut-2-en-1-yl diphosphate synthase, and having at least 95% sequence identity to at least one amino acid sequence selected from the group consisting of SEQ ID NOs:83-89, 160, 174, 185; and
m. 4-hydroxy-3-methylbut-2-enyl diphosphate reductase having at least 95% sequence identity to at least one amino acid sequence selected from the group consisting of SEQ ID NOs:90-97, 161-163, 175, 186.

23. The method of claim 13, wherein the set of heterologous nucleic acids encoding enzymes of the mevalonic acid pathway comprises nucleic acids encoding:
a. acetyl-CoA acetyltransferase having at least 99% sequence identity to at least one amino acid sequence selected from the group consisting of SEQ ID NOs:1-4, 143;
b. 3-hydroxy-3-methylglutaryl coenzyme A synthase having at least 99% sequence identity to at least one amino acid sequence selected from the group consisting of SEQ ID NOs:5-9, 144, 145;
c. 3-hydroxy-3-methylglutaryl-coenzyme A reductase having at least 99% sequence identity to at least one amino acid sequence selected from the group consisting of SEQ ID NOs:10-16, 17-20, 146-150;
d. mevalonate kinase, having at least 99% sequence identity to at least one amino acid sequence selected from the group consisting of SEQ ID NOs:21-26, 151;
e. phosphomevalonate kinase, having at least 99% sequence identity to at least one amino acid sequence selected from the group consisting of SEQ ID NOs:27-33 and
f. mevalonate pyrophosphate decarboxylase having at least 99% sequence identity to at least one amino acid sequence selected from the group consisting of SEQ ID NOs:34-40, 152;
and wherein the set of heterologous nucleic acids encoding enzymes of the methylerythritol 4-phosphate pathway comprise nucleic acid encoding a:
g. 1-deoxy-D-xylulose-5-phosphate synthase, having at least 99% sequence identity to at least one amino acid sequence selected from the group consisting of SEQ ID NOs:41-49, 153, 154, 169, 177-180;
h. 1-deoxy-D-xylulose 5-phosphate reductoisomerase, having at least 99% sequence identity to at least one amino acid sequence selected from the group consisting of SEQ ID NOs:50-58, 155, 156, 170, 181;
i. 4-diphosphocytidyl-2-C-methyl-D-erythritol synthase, having at least 99% sequence identity to at least one amino acid sequence selected from the group consisting of SEQ ID NOs:59-67, 157, 171, 182;
j. 4-diphosphocytidyl-2-C-methyl-D-erythritol kinase, having at least 99% sequence identity to at least one amino acid sequence selected from the group consisting of SEQ ID NOs:68-73, 158, 172, 183;
k. 2-C-methyl-D-erythritol 2,4-cyclodiphosphate synthase, having at least 99% sequence identity to at least one amino acid sequence selected from the group consisting of SEQ ID NOs:74-82, 159, 173, 184;
l. 4-hydroxy-3-methylbut-2-en-1-yl diphosphate synthase, and having at least 99% sequence identity to at least one amino acid sequence selected from the group consisting of SEQ ID NOs:83-89, 160, 174, 185; and
m. 4-hydroxy-3-methylbut-2-enyl diphosphate reductase having at least 99% sequence identity to at least one amino acid sequence selected from the group consisting of SEQ ID NOs:90-97, 161-163, 175, 186.

24. The method of claim 13, wherein the set of heterologous nucleic acids encoding enzymes of the mevalonic acid pathway comprises nucleic acids encoding:
a. acetyl-CoA acetyltransferase is sequence selected from the group consisting of SEQ ID NOs:1-4, 143;
b. 3-hydroxy-3-methylglutaryl coenzyme A synthase is sequence selected from the group consisting of SEQ ID NOs:5-9, 144, 145;
c. 3-hydroxy-3-methylglutaryl-coenzyme A reductase is sequence selected from the group consisting of SEQ ID NOs:10-16, 17-20, 146-150;
d. mevalonate kinase, is sequence selected from the group consisting of SEQ ID NOs:21-26, 151;
e. phosphomevalonate kinase, is sequence selected from the group consisting of SEQ ID NOs:27-33 and
f. mevalonate pyrophosphate decarboxylase is sequence selected from the group consisting of SEQ ID NOs:34-40, 152;
and wherein the set of heterologous nucleic acids encoding enzymes of the methylerythritol 4-phosphate pathway comprise nucleic acid encoding a:
g. 1-deoxy-D-xylulose-5-phosphate synthase, is sequence selected from the group consisting of SEQ ID NOs:41-49, 153, 154, 169, 177-180;
h. 1-deoxy-D-xylulose 5-phosphate reductoisomerase, is sequence selected from the group consisting of SEQ ID NOs:50-58, 155, 156, 170, 181;
i. 4-diphosphocytidyl-2-C-methyl-D-erythritol synthase, is sequence selected from the group consisting of SEQ ID NOs:59-67, 157, 171, 182;
j. 4-diphosphocytidyl-2-C-methyl-D-erythritol kinase, is sequence selected from the group consisting of SEQ ID NOs:68-73, 158, 172, 183;
k. 2-C-methyl-D-erythritol 2,4-cyclodiphosphate synthase, is sequence selected from the group consisting of SEQ ID NOs:74-82, 159, 173, 184;
l. 4-hydroxy-3-methylbut-2-en-1-yl diphosphate synthase, and is sequence selected from the group consisting of SEQ ID NOs:83-89, 160, 174, 185; and
m. 4-hydroxy-3-methylbut-2-enyl diphosphate reductase is sequence selected from the group consisting of SEQ ID NOs:90-97, 161-163, 175, 186.

25. The method of claim 3-5 wherein the heterologous nucleic acids encoding the isopentenyl-diphosphate delta-isomerase, the farnesyl diphosphate synthase; and the farnesene synthase are encoded by a nucleic acid encoding a(n):
a. isopentenyl-diphosphate delta-isomerase, having at least 70% sequence identity to at least one amino acid sequence selected from the group consisting of SEQ ID NOs:98-101, 102-106, 188, 190-192;
b. farnesyl diphosphate synthase, having at least 70% sequence identity to at least one amino acid sequence selected from the group consisting of SEQ ID NOs:107-111, 164, 165, 176, 187, 189; and
c. farnesene synthase, having at least 70% sequence identity to at least one amino acid sequence selected from the group consisting of SEQ ID NOs:112-115, 116-117, 166-168.

26. The method of claim 3-5, wherein the heterologous nucleic acids encoding the isopentenyl-diphosphate delta-isomerase, the farnesyl diphosphate synthase; and the farnesene synthase are encoded by a nucleic acid encoding a(n):
a. isopentenyl-diphosphate delta-isomerase, having at least 80% sequence identity to at least one amino acid sequence selected from the group consisting of SEQ ID NOs:98-101, 102-106, 188, 190-192;
b. farnesyl diphosphate synthase, having at least 80% sequence identity to at least one amino acid sequence selected from the group consisting of SEQ ID NOs:107-111, 164, 165, 176, 187, 189; and
c. farnesene synthase, having at least 80% sequence identity to at least one amino acid sequence selected from the group consisting of SEQ ID NOs:112-115, 116-117, 166-168.

27. The method of claim 3-5, wherein the heterologous nucleic acids encoding the isopentenyl-diphosphate delta-isomerase, the farnesyl diphosphate synthase; and the farnesene synthase are encoded by a nucleic acid encoding a(n):
a. isopentenyl-diphosphate delta-isomerase, having at least 90% sequence identity to at least one amino acid sequence selected from the group consisting of SEQ ID NOs:98-101, 102-106, 188, 190-192;
b. farnesyl diphosphate synthase, having at least 90% sequence identity to at least one amino acid sequence selected from the group consisting of SEQ ID NOs:107-111, 164, 165, 176, 187, 189; and
c. farnesene synthase, having at least 90% sequence identity to at least one amino acid sequence selected from the group consisting of SEQ ID NOs:112-115, 116-117, 166-168.

28. The method of claim 3-5, wherein the heterologous nucleic acids encoding the isopentenyl-diphosphate delta-isomerase, the farnesyl diphosphate synthase; and the farnesene synthase are encoded by a nucleic acid encoding a(n):
a. isopentenyl-diphosphate delta-isomerase, having at least 95% sequence identity to at least one amino acid sequence selected from the group consisting of SEQ ID NOs:98-101, 102-106, 188, 190-192;
b. farnesyl diphosphate synthase, having at least 95% sequence identity to at least one amino acid sequence selected from the group consisting of SEQ ID NOs:107-111, 164, 165, 176, 187, 189; and
c. farnesene synthase, having at least 95% sequence identity to at least one amino acid sequence selected from the group consisting of SEQ ID NOs:112-115, 116-117, 166-168.

29. The method of claim 3-5, wherein the heterologous nucleic acids encoding the isopentenyl-diphosphate delta-isomerase, the farnesyl diphosphate synthase; and the farnesene synthase are encoded by a nucleic acid encoding a(n):
a. isopentenyl-diphosphate delta-isomerase, having at least 99% sequence identity to at least one amino acid sequence selected from the group consisting of SEQ ID NOs:98-101, 102-106, 188, 190-192;
b. farnesyl diphosphate synthase, having at least 99% sequence identity to at least one amino acid sequence selected from the group consisting of SEQ ID NOs:107-111, 164, 165, 176, 187, 189; and
c. farnesene synthase, having at least 99% sequence identity to at least one amino acid sequence selected from the group consisting of SEQ ID NOs:112-115, 116-117, 166-168.

30. The method of claim 3-5, wherein the heterologous nucleic acids encoding the isopentenyl-diphosphate delta-isomerase, the farnesyl diphosphate synthase; and the farnesene synthase are encoded by a nucleic acid encoding a(n):
a. isopentenyl-diphosphate delta-isomerase, is selected from the group consisting of SEQ ID NOs:98-101, 102-106, 188, 190-192;
b. farnesyl diphosphate synthase, is selected from the group consisting of SEQ ID NOs:107-111, 164, 165, 176, 187, 189; and
c. farnesene synthase, is selected from the group consisting of SEQ ID NOs:112-115, 116-117, 166-168.

31. The method of claim 1, wherein at least one of the heterologous nucleic acids is selected from the group consisting of Archaea, bacteria, fungi, and plantae kingdoms.

32. The method of claim 31, wherein the set of heterologous nucleic acids encode enzymes from the plantae kingdom.

33. The method of claim 32, wherein the set of heterologous nucleic acids encoding enzymes of the mevalonic pathway comprise nucleic acids encoding a(n):
a. acetyl-CoA acetyltransferase having at least 70% sequence identity to SEQ ID NO:4;
b. 3-hydroxy-3-methylglutaryl coenzyme A synthase having at least 70% sequence identity to at least one amino acid sequence selected from the group consisting of SEQ ID NOs:
8-9;
c. 3-hydroxy-3-methylglutaryl-coenzyme A reductase having at least 70% sequence identity to at least one amino acid sequence selected from the group consisting of SEQ ID NOs:15, 16, 20;
d. mevalonate kinase, having at least 70% sequence identity SEQ ID NO:26;
e. phosphomevalonate kinase, having at least 70% sequence identity to at least one amino acid sequence selected from the group consisting of SEQ ID NOs:32-33 and
f. mevalonate pyrophosphate decarboxylase having at least 70% sequence identity to at least one amino acid sequence selected from the group consisting of SEQ ID NOs:39-40;
and wherein the set of heterologous nucleic acids encoding enzymes of the methylerythritol 4-phosphate pathway comprise nucleic acid encoding a:
g. 1-deoxy-D-xylulose-5-phosphate synthase, having at least 70% sequence identity to at least one amino acid sequence selected from the group consisting of SEQ ID NOs:41, 48-49;
h. 1-deoxy-D-xylulose 5-phosphate reductoisomerase, having at least 70% sequence identity to at least one amino acid sequence selected from the group consisting of SEQ ID NOs:50, 56-58;
i. 4-diphosphocytidyl-2-C-methyl-D-erythritol synthase, having at least 70% sequence identity to at least one amino acid sequence selected from the group consisting of SEQ ID NOs:59, 66-67;
j. 4-diphosphocytidyl-2-C-methyl-D-erythritol kinase, having at least 70% sequence identity to at least one amino acid sequence selected from the group consisting of SEQ ID NOs:68, 73;
k. 2-C-methyl-D-erythritol 2,4-cyclodiphosphate synthase, having at least 70% sequence identity to at least one amino acid sequence selected from the group consisting of SEQ ID NOs:74, 80-82;
l. 4-hydroxy-3-methylbut-2-en-1-yl diphosphate synthase, and having at least 70% sequence identity to at least one amino acid sequence selected from the group consisting of SEQ ID NOs:83, 89; and
m. 4-hydroxy-3-methylbut-2-enyl diphosphate reductase having at least 70% sequence identity to at least one amino acid sequence selected from the group consisting of SEQ ID NOs:90, 96-97.

34. The method of claim 32, wherein the set of heterologous nucleic acids encoding enzymes of the mevalonic acid pathway comprises nucleic acids encoding:
a. acetyl-CoA acetyltransferase having at least 80% sequence identity to SEQ ID NO:4;
b. 3-hydroxy-3-methylglutaryl coenzyme A synthase having at least 80% sequence identity to at least one amino acid sequence selected from the group consisting of SEQ ID NOs: 8-9;
c. 3-hydroxy-3-methylglutaryl-coenzyme A reductase having at least 80% sequence identity to at least one amino acid sequence selected from the group consisting of SEQ ID NOs:15, 16, 20;
d. mevalonate kinase, having at least 80% sequence identity SEQ ID NO:26;
e. phosphomevalonate kinase, having at least 80% sequence identity to at least one amino acid sequence selected from the group consisting of SEQ ID NOs:32-33 and
f. mevalonate pyrophosphate decarboxylase having at least 80% sequence identity to at least one amino acid sequence selected from the group consisting of SEQ ID NOs:39-40;
and wherein the set of heterologous nucleic acids encoding enzymes of the methylerythritol 4-phosphate pathway comprise nucleic acid encoding a:
g. 1-deoxy-D-xylulose-5-phosphate synthase, having at least 80% sequence identity to at least one amino acid sequence selected from the group consisting of SEQ ID NOs:41, 48-49;
h. 1-deoxy-D-xylulose 5-phosphate reductoisomerase, having at least 80% sequence identity to at least one amino acid sequence selected from the group consisting of SEQ ID NOs:50, 56-58;
i. 4-diphosphocytidyl-2-C-methyl-D-erythritol synthase, having at least 80% sequence identity to at least one amino acid sequence selected from the group consisting of SEQ ID NOs:59, 66-67;
j. 4-diphosphocytidyl-2-C-methyl-D-erythritol kinase, having at least 80% sequence identity to at least one amino acid sequence selected from the group consisting of SEQ ID NOs:68, 73;
k. 2-C-methyl-D-erythritol 2,4-cyclodiphosphate synthase, having at least 80% sequence identity to at least one amino acid sequence selected from the group consisting of SEQ ID NOs:74, 80-82;
l. 4-hydroxy-3-methylbut-2-en-1-yl diphosphate synthase, and having at least 80% sequence identity to at least one amino acid sequence selected from the group consisting of SEQ ID NOs:83, 89; and
m. 4-hydroxy-3-methylbut-2-enyl diphosphate reductase having at least 80% sequence identity to at least one amino acid sequence selected from the group consisting of SEQ ID NOs:90, 96-97.

35. The method of claim 32, wherein the set of heterologous nucleic acids encoding enzymes of the mevalonic acid pathway comprises nucleic acids encoding:
a. acetyl-CoA acetyltransferase having at least 90% sequence identity to SEQ ID NO:4;
b. 3-hydroxy-3-methylglutaryl coenzyme A synthase having at least 90% sequence identity to at least one amino acid sequence selected from the group consisting of SEQ ID NOs: 8-9;
c. 3-hydroxy-3-methylglutaryl-coenzyme A reductase having at least 90% sequence identity to at least one amino acid sequence selected from the group consisting of SEQ ID NOs:15, 16, 20;
d. mevalonate kinase, having at least 90% sequence identity SEQ ID NO:26;
e. phosphomevalonate kinase, having at least 90% sequence identity to at least one amino acid sequence selected from the group consisting of SEQ ID NOs:32-33 and
f. mevalonate pyrophosphate decarboxylase having at least 90% sequence identity to at least one amino acid sequence selected from the group consisting of SEQ ID NOs:39-40;
and wherein the set of heterologous nucleic acids encoding enzymes of the methylerythritol 4-phosphate pathway comprise nucleic acid encoding a:
g. 1-deoxy-D-xylulose-5-phosphate synthase, having at least 90% sequence identity to at least one amino acid sequence selected from the group consisting of SEQ ID NOs:41, 48-49;
h. 1-deoxy-D-xylulose 5-phosphate reductoisomerase, having at least 90% sequence identity to at least one amino acid sequence selected from the group consisting of SEQ ID NOs:50, 56-58;
i. 4-diphosphocytidyl-2-C-methyl-D-erythritol synthase, having at least 90% sequence identity to at least one amino acid sequence selected from the group consisting of SEQ ID NOs:59, 66-67;
j. 4-diphosphocytidyl-2-C-methyl-D-erythritol kinase, having at least 90% sequence identity to at least one amino acid sequence selected from the group consisting of SEQ ID NOs:68, 73;
k. 2-C-methyl-D-erythritol 2,4-cyclodiphosphate synthase, having at least 90% sequence identity to at least one amino acid sequence selected from the group consisting of SEQ ID NOs:74, 80-82;
l. 4-hydroxy-3-methylbut-2-en-1-yl diphosphate synthase, and having at least 90% sequence identity to at least one amino acid sequence selected from the group consisting of SEQ ID NOs:83, 89; and
m. 4-hydroxy-3-methylbut-2-enyl diphosphate reductase having at least 90% sequence identity to at least one amino acid sequence selected from the group consisting of SEQ ID NOs:90, 96-97.

36. The method of claim 32, wherein the set of heterologous nucleic acids encoding enzymes of the mevalonic acid pathway comprises nucleic acids encoding:
a. acetyl-CoA acetyltransferase having at least 95% sequence identity to SEQ ID NO:4;
b. 3-hydroxy-3-methylglutaryl coenzyme A synthase having at least 95% sequence identity to at least one amino acid sequence selected from the group consisting of SEQ ID NOs: 8-9;
c. 3-hydroxy-3-methylglutaryl-coenzyme A reductase having at least 95% sequence identity to at least one amino acid sequence selected from the group consisting of SEQ ID NOs:15, 16, 20;
d. mevalonate kinase, having at least 95% sequence identity SEQ ID NO:26;
e. phosphomevalonate kinase, having at least 95% sequence identity to at least one amino acid sequence selected from the group consisting of SEQ ID NOs:32-33 and
f. mevalonate pyrophosphate decarboxylase having at least 95% sequence identity to at least one amino acid sequence selected from the group consisting of SEQ ID NOs:39-40;
and wherein the set of heterologous nucleic acids encoding enzymes of the methylerythritol 4-phosphate pathway comprise nucleic acid encoding a:
g. 1-deoxy-D-xylulose-5-phosphate synthase, having at least 95% sequence identity to at least one amino acid sequence selected from the group consisting of SEQ ID NOs:41, 48-49;
h. 1-deoxy-D-xylulose 5-phosphate reductoisomerase, having at least 95% sequence identity to at least one amino acid sequence selected from the group consisting of SEQ ID NOs:50, 56-58;
i. 4-diphosphocytidyl-2-C-methyl-D-erythritol synthase, having at least 95% sequence identity to at least one amino acid sequence selected from the group consisting of SEQ ID NOs:59, 66-67;
j. 4-diphosphocytidyl-2-C-methyl-D-erythritol kinase, having at least 95% sequence identity to at least one amino acid sequence selected from the group consisting of SEQ ID NOs:68, 73;
k. 2-C-methyl-D-erythritol 2,4-cyclodiphosphate synthase, having at least 95% sequence identity to at least one amino acid sequence selected from the group consisting of SEQ ID NOs:74, 80-82;
l. 4-hydroxy-3-methylbut-2-en-1-yl diphosphate synthase, and having at least 95% sequence identity to at least one amino acid sequence selected from the group consisting of SEQ ID NOs:83, 89; and
m. 4-hydroxy-3-methylbut-2-enyl diphosphate reductase having at least 95% sequence identity to at least one amino acid sequence selected from the group consisting of SEQ ID NOs:90, 96-97.

37. The method of claim 32, wherein the set of heterologous nucleic acids encoding enzymes of the mevalonic acid pathway comprises nucleic acids encoding:
a. acetyl-CoA acetyltransferase having at least 99% sequence identity to SEQ ID NO:4;
b. 3-hydroxy-3-methylglutaryl coenzyme A synthase having at least 99% sequence identity to at least one amino acid sequence selected from the group consisting of SEQ ID NOs: 8-9;
c. 3-hydroxy-3-methylglutaryl-coenzyme A reductase having at least 99% sequence identity to at least one amino acid sequence selected from the group consisting of SEQ ID NOs:15, 16, 20;
d. mevalonate kinase, having at least 99% sequence identity SEQ ID NO:26;
e. phosphomevalonate kinase, having at least 99% sequence identity to at least one amino acid sequence selected from the group consisting of SEQ ID NOs:32-33 and
f. mevalonate pyrophosphate decarboxylase having at least 99% sequence identity to at least one amino acid sequence selected from the group consisting of SEQ ID NOs:39-40;
and wherein the set of heterologous nucleic acids encoding enzymes of the methylerythritol 4-phosphate pathway comprise nucleic acid encoding a:
g. 1-deoxy-D-xylulose-5-phosphate synthase, having at least 99% sequence identity to at least one amino acid sequence selected from the group consisting of SEQ ID NOs:41, 48-49;
h. 1-deoxy-D-xylulose 5-phosphate reductoisomerase, having at least 99% sequence identity to at least one amino acid sequence selected from the group consisting of SEQ ID NOs:50, 56-58;
i. 4-diphosphocytidyl-2-C-methyl-D-erythritol synthase, having at least 99% sequence identity to at least one amino acid sequence selected from the group consisting of SEQ ID NOs:59, 66-67;
j. 4-diphosphocytidyl-2-C-methyl-D-erythritol kinase, having at least 99% sequence identity to at least one amino acid sequence selected from the group consisting of SEQ ID NOs:68, 73;
k. 2-C-methyl-D-erythritol 2,4-cyclodiphosphate synthase, having at least 99% sequence identity to at least one amino acid sequence selected from the group consisting of SEQ ID NOs:74, 80-82;
l. 4-hydroxy-3-methylbut-2-en-1-yl diphosphate synthase, and having at least 99% sequence identity to at least one amino acid sequence selected from the group consisting of SEQ ID NOs:83, 89; and
m. 4-hydroxy-3-methylbut-2-enyl diphosphate reductase having at least 99% sequence identity to at least one amino acid sequence selected from the group consisting of SEQ ID NOs:90, 96-97.

38. The method of claim 32, wherein the set of heterologous nucleic acids encoding enzymes of the mevalonic acid pathway comprises nucleic acids encoding:
a. acetyl-CoA acetyltransferase is sequence selected from the group consisting of SEQ ID NO:4;
b. 3-hydroxy-3-methylglutaryl coenzyme A synthase is sequence selected from the group consisting of SEQ ID NOs: 8-9;
c. 3-hydroxy-3-methylglutaryl-coenzyme A reductase is sequence selected from the group consisting of SEQ ID NOs:15, 16, 20;
d. mevalonate kinase, is sequence selected from the group consisting of SEQ ID NOs:26;
e. phosphomevalonate kinase, is sequence selected from the group consisting of SEQ ID NOs:32-33 and
f. mevalonate pyrophosphate decarboxylase is sequence selected from the group consisting of SEQ ID NOs:39-40;
and wherein the set of heterologous nucleic acids encoding enzymes of the methylerythritol 4-phosphate pathway comprise nucleic acid encoding a:
g. 1-deoxy-D-xylulose-5-phosphate synthase, is sequence selected from the group consisting of SEQ ID NOs:41, 48-49;
h. 1-deoxy-D-xylulose 5-phosphate reductoisomerase, is sequence selected from the group consisting of SEQ ID NOs:50, 56-58;
i. 4-diphosphocytidyl-2-C-methyl-D-erythritol synthase, is sequence selected from the group consisting of SEQ ID NOs:59, 66-67;
j. 4-diphosphocytidyl-2-C-methyl-D-erythritol kinase, is sequence selected from the group consisting of SEQ ID NOs:68, 73;
k. 2-C-methyl-D-erythritol 2,4-cyclodiphosphate synthase, is sequence selected from the group consisting of SEQ ID NOs:74, 80-82;
l. 4-hydroxy-3-methylbut-2-en-1-yl diphosphate synthase, and is sequence selected from the group consisting of SEQ ID NOs:83, 89; and
m. 4-hydroxy-3-methylbut-2-enyl diphosphate reductase is sequence selected from the group consisting of SEQ ID NOs:90, 96-97.

39. The method of claim 3-5, wherein the heterologous nucleic acids encoding the isopentenyl-diphosphate delta-isomerase, the farnesyl diphosphate synthase; and the farnesene synthase are enzymes selected from the group consisting of Archaea, bacteria, fungi, and plantae kingdoms.

40. The method of claim 39, wherein the enzymes are from the plantae kingdom.

41. The method of claim 40 wherein the heterologous nucleic acids encoding the isopentenyl-diphosphate delta-isomerase, the farnesyl diphosphate synthase; and the farnesene synthase are encoded by a nucleic acid encoding a(n):
a. isopentenyl-diphosphate delta-isomerase, having at least 70% sequence identity to at least one amino acid sequence selected from the group consisting of SEQ ID NOs:98-101, 102-106, 188, 190-192;
b. farnesyl diphosphate synthase, having at least 70% sequence identity to at least one amino acid sequence selected from the group consisting of SEQ ID NOs:107-111, 164, 165, 176, 187, 189; and
c. farnesene synthase, having at least 70% sequence identity to at least one amino acid sequence selected from the group consisting of SEQ ID NOs:112-115, 116-117, 166-168.

42. The method of claim 40 wherein the heterologous nucleic acids encoding the isopentenyl-diphosphate delta-isomerase, the farnesyl diphosphate synthase; and the farnesene synthase are encoded by a nucleic acid encoding a(n):
a. isopentenyl-diphosphate delta-isomerase, having at least 80% sequence identity to at least one amino acid sequence selected from the group consisting of SEQ ID NOs:98-101, 102-106, 188, 190-192;
b. farnesyl diphosphate synthase, having at least 80% sequence identity to at least one amino acid sequence selected from the group consisting of SEQ ID NOs:107-111, 164, 165, 176, 187, 189; and
c. farnesene synthase, having at least 80% sequence identity to at least one amino acid sequence selected from the group consisting of SEQ ID NOs:112-115, 116-117, 166-168.

43. The method of claim 40 wherein the heterologous nucleic acids encoding the isopentenyl-diphosphate delta-isomerase, the farnesyl diphosphate synthase; and the farnesene synthase are encoded by a nucleic acid encoding a(n):
a. isopentenyl-diphosphate delta-isomerase, having at least 90% sequence identity to at least one amino acid sequence selected from the group consisting of SEQ ID NOs:98-101, 102-106, 188, 190-192;
b. farnesyl diphosphate synthase, having at least 90% sequence identity to at least one amino acid sequence selected from the group consisting of SEQ ID NOs:107-111, 164, 165, 176, 187, 189; and
c. farnesene synthase, having at least 90% sequence identity to at least one amino acid sequence selected from the group consisting of SEQ ID NOs:112-115, 116-117, 166-168.

44. The method of claim 40 wherein the heterologous nucleic acids encoding the isopentenyl-diphosphate delta-isomerase, the farnesyl diphosphate synthase; and the farnesene synthase are encoded by a nucleic acid encoding a(n):
a. isopentenyl-diphosphate delta-isomerase, having at least 95% sequence identity to at least one amino acid sequence selected from the group consisting of SEQ ID NOs:98-101, 102-106, 188, 190-192;
b. farnesyl diphosphate synthase, having at least 95% sequence identity to at least one amino acid sequence selected from the group consisting of SEQ ID NOs:107-111, 164, 165, 176, 187, 189; and
c. farnesene synthase, having at least 95% sequence identity to at least one amino acid sequence selected from the group consisting of SEQ ID NOs:112-115, 116-117, 166-168.

45. The method of claim 40 wherein the heterologous nucleic acids encoding the isopentenyl-diphosphate delta-isomerase, the farnesyl diphosphate synthase; and the farnesene synthase are encoded by a nucleic acid encoding a(n):
a. isopentenyl-diphosphate delta-isomerase, having at least 99% sequence identity to at least one amino acid sequence selected from the group consisting of SEQ ID NOs:98-101, 102-106, 188, 190-192;
b. farnesyl diphosphate synthase, having at least 99% sequence identity to at least one amino acid sequence selected from the group consisting of SEQ ID NOs:107-111, 164, 165, 176, 187, 189; and
c. farnesene synthase, having at least 99% sequence identity to at least one amino acid sequence selected from the group consisting of SEQ ID NOs:112-115, 116-117, 166-168.

46. The method of claim 40 wherein the heterologous nucleic acids encoding the isopentenyl-diphosphate delta-isomerase, the farnesyl diphosphate synthase; and the farnesene synthase are encoded by a nucleic acid encoding a(n):
a. isopentenyl-diphosphate delta-isomerase, is selected from the group consisting of SEQ ID NOs:98-101, 102-106, 188, 190-192;
b. farnesyl diphosphate synthase, is selected from the group consisting of SEQ ID NOs:107-111, 164, 165, 176, 187, 189; and
c. farnesene synthase, is selected from the group consisting of SEQ ID NOs:112-115, 116-117, 166-168.

47. The method of claim 1, wherein the plant cell is a cell from a plant selected from the group consisting of a green algae, a vegetable crop plant, a fruit crop plant, a vine crop plant, a field crop plant, a biomass plant, a bedding plant, and a tree.

48. The method of claim 47, wherein the plant is selected from the group consisting of corn, soybean, Brassica, tomato, sorghum, sugar cane, Hevea, miscanthus, guayle, switchgrass, wheat, barley, oat, rye, wheat, rice, beet, green algae and cotton.

49. The method of claim 48, wherein the plant is sorghum, sugar cane, Hevea, or guayle.

50. The method of claim 1, further comprising isolating the farnesene.

51. The method of claim 50, wherein the isolated farnesene is further processed into farnesane.

52. A plant cell made by any of the methods of claims 1-2.

53. A method of increasing production of at least one terpenoid in a plant, the method comprising of making a plant that comprises at least one plant cell made by claim 52, wherein at least one terpenoid is increased when compared to a plant not comprising at least one plant cell made by claim 52.

54. A plant comprising a plant cell of claim 52.

55. A fuel comprising a terpenoid made according to any of claims 1-2, 53, or made by a plant cell of claim 52 or by a plant of claim 54.

56. The fuel of claim 55, wherein the terpenoid is a sesquiterpenoid.

57. The fuel of claim 56, wherein the sesquiterpenoid is farnesene.
